(19) United States
(12) Patent Application Publication
(10) Pub. No.: US 2002/0136728 A1
(43) Pub. Date: Sep. 26, 2002

(54) Compositions and methods for the therapy and diagnosis of colon cancer

(76) Inventors: Gordon E. King, Seattle, WA (US); Madeleine Joy Meagher, Seattle, WA (US); Jiangchun Xu, Bellevue, WA (US); Heather Secrist, Seattle, WA (US)

Correspondence Address: SEED INTELLECTUAL PROPERTY LAW GROUP PLLC, 701 FIFTH AVE, SUITE 6300, SEATTLE, WA, 98104-7092, US

(21) Appl. No.: 09/920,300

(22) Filed: Jul. 31, 2001

Related U.S. Application Data
(60) Provisional application No. 60/302,051, filed on Jun. 29, 2001.
(60) Provisional application No. 60/279,763, filed on Mar. 28, 2001.
(60) Provisional application No. 60/223,283, filed on Aug. 3, 2000.

(51) Int. Cl. C12Q 1/68; G01N 33/574; C07H 21/04; A61K 39/395; C12N 9/00; C12P 21/02; C12N 5/06; C07K 16/30; C07K 14/435

(52) U.S. Cl. 424/155.1; 435/6; 435/7.23; 435/69.1; 435/183; 435/320.1; 530/350; 530/388.8; 536/23.2

(57) ABSTRACT

Compositions and methods for the therapy and diagnosis of cancer, particularly colon cancer, are disclosed. Illustrative compositions comprise one or more colon tumor polypeptides, immunogenic portions thereof, polynucleotides that encode such polypeptides, antigen presenting cell that expresses such polypeptides, and T cells that are specific for cells expressing such polypeptides. The disclosed compositions are useful, for example, in the diagnosis, prevention and/or treatment of diseases, particularly colon cancer.

### CROSS REFERENCE TO RELATED APPLICATIONS

[0001] This application is related to U.S. Provisional Application No. 60/302,051 filed Jun. 29, 2001, U.S. Provisional Application No. 60/279,763 filed Mar. 28, 2001,and U.S. Provisional Application No. 60/223,283 filed Aug. 3, 2000, all incorporated in their entirety herein by reference.

### BACKGROUND OF THE INVENTION

[0002] 1. Field of the Invention

[0003] The present invention relates generally to therapy and diagnosis of cancer, such as colon cancer. The invention is more specifically related to polypeptides, comprising at least a portion of a colon tumor protein, and to polynucleotides encoding such polypeptides. Such polypeptides and polynucleotides are useful in pharmaceutical compositions, e.g., vaccines, and other compositions for the diagnosis and treatment of colon cancer.

[0004] 2. Description of the Related Art

[0005] Cancer is a significant health problem throughout the world. Although advances have been made in detection and therapy of cancer, no vaccine or other universally successful method for prevention and/or treatment is currently available. Current therapies, which are generally based on a combination of chemotherapy or surgery and radiation, continue to prove inadequate in many patients.

[0006] Colon cancer is the second most frequently diagnosed malignancy in the United States as well as the second most common cause of cancer death. The five-year survival rate for patients with colorectal cancer detected in an early localized stage is 92%; unfortunately, only 37% of colorectal cancer is diagnosed at this stage. The survival rate drops to 64% if the cancer is allowed to spread to adjacent organs or lymph nodes, and to 7% in patients with distant metastases.

[0007] The prognosis of colon cancer is directly related to the degree of penetration of the tumor through the bowel wall and the presence or absence of nodal involvement, consequently, early detection and treatment are especially important. Currently, diagnosis is aided by the use of screening assays for fecal occult blood, sigmoidoscopy, colonoscopy and double contrast barium enemas. Treatment regimens are determined by the type and stage of the cancer, and include surgery, radiation therapy and/or chemotherapy. Recurrence following surgery (the most common form of therapy) is a major problem and is often the ultimate cause of death. In spite of considerable research into therapies for the disease, colon cancer remains difficult to diagnose and treat. In spite of considerable research into therapies for these and other cancers, colon cancer remains difficult to diagnose and treat effectively. Accordingly, there is a need in the art for improved methods for detecting and treating such cancers. The present invention fulfills these needs and further provides other related advantages.

[0008] In spite of considerable research into therapies for these and other cancers, colon cancer remains difficult to diagnose and treat effectively. Accordingly, there is a need in the art for improved methods for detecting and treating such cancers. The present invention fulfills these needs and further provides other related advantages.

### BRIEF SUMMARY OF THE INVENTION

[0009] In one aspect, the present invention provides polynucleotide compositions comprising a sequence selected from the group consisting of:

[0010] (a) sequences provided in SEQ ID NO:1-1788;

[0011] (b) complements of the sequences provided in SEQ ID NO:1-1788;

[0012] (c) sequences consisting of at least 20, 25, 30, 35, 40, 45, 50, 75 and 100 contiguous residues of a sequence provided in SEQ ID NO:1-1788;

[0013] (d) sequences that hybridize to a sequence provided in SEQ ID NO:1-1788, under moderate or highly stringent conditions;

[0014] (e) sequences having at least 75%, 80%, 85%, 90%, 95%, 96%, 97%, 98% or 99% identity to a sequence of SEQ ID NO:1-1788;

[0015] (f) degenerate variants of a sequence provided in SEQ ID NO:1-1788.

[0016] In one preferred embodiment, the polynucleotide compositions of the invention are expressed in at least about 20%, more preferably in at least about 30%, and most preferably in at least about 50% of colon tumor samples tested, at a level that is at least about 2-fold, preferably at least about 5-fold, and most preferably at least about 10-fold higher than that for normal tissues.

[0017] The present invention, in another aspect, provides polypeptide compositions comprising an amino acid sequence that is encoded by a polynucleotide sequence described above.

[0018] The present invention further provides polypeptide compositions comprising an amino acid sequence selected from the group consisting of sequences recited in SEQ ID NO:1789.

[0019] In certain preferred embodiments, the polypeptides and/or polynucleotides of the present invention are immunogenic, i.e., they are capable of eliciting an immune response, particularly a humoral and/or cellular immune response, as further described herein.

[0020] The present invention further provides fragments, variants and/or derivatives of the disclosed polypeptide and/or polynucleotide sequences, wherein the fragments, variants and/or derivatives preferably have a level of immunogenic activity of at least about 50%, preferably at least about 70% and more preferably at least about 90% of the level of immunogenic activity of a polypeptide sequence set forth in SEQ ID NO:1789 or a polypeptide sequence encoded by a polynucleotide sequence set forth in SEQ ID NO:1-1788.

[0021] The present invention further provides polynucleotides that encode a polypeptide described above, expression vectors comprising such polynucleotides and host cells transformed or transfected with such expression vectors.

[0022] Within other aspects, the present invention provides pharmaceutical compositions comprising a polypeptide or polynucleotide as described above and a physiologically acceptable carrier.

[0023] Within a related aspect of the present invention, the pharmaceutical compositions, e.g., vaccine compositions, are provided for prophylactic or therapeutic applications. Such compositions generally comprise an immunogenic polypeptide or polynucleotide of the invention and an immunostimulant, such as an adjuvant.

[0024] The present invention further provides pharmaceutical compositions that comprise: (a) an antibody or antigen-binding fragment thereof that specifically binds to a polypeptide of the present invention, or a fragment thereof; and (b) a physiologically acceptable carrier.

[0025] Within further aspects, the present invention provides pharmaceutical compositions comprising: (a) an antigen presenting cell that expresses a polypeptide as described above and (b) a pharmaceutically acceptable carrier or excipient. Illustrative antigen presenting cells include dendritic cells, macrophages, monocytes, fibroblasts and B cells.

[0026] Within related aspects, pharmaceutical compositions are provided that comprise: (a) an antigen presenting cell that expresses a polypeptide as described above and (b) an immunostimulant.

[0027] The present invention further provides, in other aspects, fusion proteins that comprise at least one polypeptide as described above, as well as polynucleotides encoding such fusion proteins, typically in the form of pharmaceutical compositions, e.g., vaccine compositions, comprising a physiologically acceptable carrier and/or an immunostimulant. The fusions proteins may comprise multiple immunogenic polypeptides or portions/variants thereof, as described herein, and may further comprise one or more polypeptide segments for facilitating the expression, purification and/or immunogenicity of the polypeptide(s).

[0028] Within further aspects, the present invention provides methods for stimulating an immune response in a patient, preferably a T cell response in a human patient, comprising administering a pharmaceutical composition described herein. The patient may be afflicted with colon cancer, in which case the methods provide treatment for the disease, or patient considered at risk for such a disease may be treated prophylactically.

[0029] Within further aspects, the present invention provides methods for inhibiting the development of a cancer in a patient, comprising administering to a patient a pharmaceutical composition as recited above. The patient may be afflicted with colon cancer, in which case the methods provide treatment for the disease, or patient considered at risk for such a disease may be treated prophylactically.

[0030] The present invention further provides, within other aspects, methods for removing tumor cells from a biological sample, comprising contacting a biological sample with T cells that specifically react with a polypeptide of the present invention, wherein the step of contacting is performed under conditions and for a time sufficient to permit the removal of cells expressing the protein from the sample.

[0031] Within related aspects, methods are provided for inhibiting the development of a cancer in a patient, comprising administering to a patient a biological sample treated as described above.

[0032] Methods are further provided, within other aspects, for stimulating and/or expanding T cells specific for a polypeptide of the present invention, comprising contacting T cells with one or more of: (i) a polypeptide as described above; (ii) a polynucleotide encoding such a polypeptide; and/or (iii) an antigen presenting cell that expresses such a polypeptide; under conditions and for a time sufficient to permit the stimulation and/or expansion of T cells. Isolated T cell populations comprising T cells prepared as described above are also provided.

[0033] Within further aspects, the present invention provides methods for inhibiting the development of a cancer in a patient, comprising administering to a patient an effective amount of a T cell population as described above.

[0034] The present invention further provides methods for inhibiting the development of a cancer in a patient, comprising the steps of: (a) incubating CD4⁺ and/or CD8⁺ T cells isolated from a patient with one or more of: (i) a polypeptide comprising at least an immunogenic portion of polypeptide disclosed herein; (ii) a polynucleotide encoding such a polypeptide; and (iii) an antigen-presenting cell that expressed such a polypeptide; and (b) administering to the patient an effective amount of the proliferated T cells, and thereby inhibiting the development of a cancer in the patient. Proliferated cells may, but need not, be cloned prior to administration to the patient.

[0035] Within further aspects, the present invention provides methods for determining the presence or absence of a cancer, preferably a colon cancer, in a patient comprising: (a) contacting a biological sample obtained from a patient with a binding agent that binds to a polypeptide as recited above; (b) detecting in the sample an amount of polypeptide that binds to the binding agent; and (c) comparing the amount of polypeptide with a predetermined cut-off value, and therefrom determining the presence or absence of a cancer in the patient. Within preferred embodiments, the binding agent is an antibody, more preferably a monoclonal antibody.

[0036] The present invention also provides, within other aspects, methods for monitoring the progression of a cancer in a patient. Such methods comprise the steps of: (a) contacting a biological sample obtained from a patient at a first point in time with a binding agent that binds to a polypeptide as recited above; (b) detecting in the sample an amount of polypeptide that binds to the binding agent; (c) repeating steps (a) and (b) using a biological sample obtained from the patient at a subsequent point in time; and (d) comparing the amount of polypeptide detected in step (c) with the amount detected in step (b) and therefrom monitoring the progression of the cancer in the patient.

[0037] The present invention further provides, within other aspects, methods for determining the presence or absence of a cancer in a patient, comprising the steps of: (a) contacting a biological sample, e.g., tumor sample, serum sample, etc., obtained from a patient with an oligonucleotide that hybridizes to a polynucleotide that encodes a polypeptide of the present invention; (b) detecting in the sample a level of a polynucleotide, preferably mRNA, that hybridizes to the oligonucleotide; and (c) comparing the level of polynucleotide that hybridizes to the oligonucleotide with a predetermined cut-off value, and therefrom determining the presence or absence of a cancer in the patient. Within certain embodiments, the amount of mRNA is detected via polymerase chain reaction using, for example, at least one oligonucleotide primer that hybridizes to a polynucleotide encoding a polypeptide as recited above, or a complement of such a polynucleotide. Within other embodiments, the amount of mRNA is detected using a hybridization technique, employing an oligonucleotide probe that hybridizes to a polynucleotide that encodes a polypeptide as recited above, or a complement of such a polynucleotide.

[0038] In related aspects, methods are provided for monitoring the progression of a cancer in a patient, comprising the steps of: (a) contacting a biological sample obtained from a patient with an oligonucleotide that hybridizes to a polynucleotide that encodes a polypeptide of the present invention; (b) detecting in the sample an amount of a polynucleotide that hybridizes to the oligonucleotide; (c) repeating steps (a) and (b) using a biological sample obtained from the patient at a subsequent point in time; and (d) comparing the amount of polynucleotide detected in step (c) with the amount detected in step (b) and therefrom monitoring the progression of the cancer in the patient.

[0039] Within further aspects, the present invention provides antibodies, such as monoclonal antibodies, that bind to a polypeptide as described above, as well as diagnostic kits comprising such antibodies. Diagnostic kits comprising one or more oligonucleotide probes or primers as described above are also provided.

[0040] These and other aspects of the present invention will become apparent upon reference to the following detailed description. All references disclosed herein are hereby incorporated by reference in their entirety as if each was incorporated individually.

### BRIEF DESCRIPTION OF THE SEQUENCE IDENTIFIERS

[0041]

| | | |
|---|---|---|
| SEQ ID NO: 1 | is the determined cDNA sequence for clone | ‘58123.1’ |
| SEQ ID NO: 2 | is the determined cDNA sequence for clone | ‘58124.1’ |
| SEQ ID NO: 3 | is the determined cDNA sequence for clone | ‘58125.1’ |
| SEQ ID NO: 4 | is the determined cDNA sequence for clone | ‘58126.1’ |
| SEQ ID NO: 5 | is the determined cDNA sequence for clone | ‘58127.1’ |
| SEQ ID NO: 6 | is the determined cDNA sequence for clone | ‘58128.1’ |
| SEQ ID NO: 7 | is the determined cDNA sequence for clone | ‘58130.1’ |
| SEQ ID NO: 8 | is the determined cDNA sequence for clone | ‘58131.1’ |
| SEQ ID NO: 9 | is the determined cDNA sequence for clone | ‘58132.1’ |
| SEQ ID NO: 10 | is the determined cDNA sequence for clone | ‘58133.1’ |
| SEQ ID NO: 11 | is the determined cDNA sequence for clone | ‘58135.1’ |
| SEQ ID NO: 12 | is the determined cDNA sequence for clone | ‘581361’ |
| SEQ ID NO: 13 | is the determined cDNA sequence for clone | ‘58138.1’ |
| SEQ ID NO: 14 | is the determined cDNA sequence for clone | ‘58139.1’ |
| SEQ ID NO: 15 | is the determined cDNA sequence for clone | ‘58141.1’ |
| SEQ ID NO: 16 | is the determined cDNA sequence for clone | ‘58142.1’ |
| SEQ ID NO: 17 | is the determined cDNA sequence for clone | ‘58143.1’ |
| SEQ ID NO: 18 | is the determined cDNA sequence for clone | ‘58144.1’ |
| SEQ ID NO: 19 | is the determined cDNA sequence for clone | ‘58148.1’ |
| SEQ ID NO: 20 | is the determined cDNA sequence for clone | ‘58149.1’ |
| SEQ ID NO: 21 | is the determined cDNA sequence for clone | ‘58150.1’ |
| SEQ ID NO: 22 | is the determined cDNA sequence for clone | ‘58151.1’ |
| SEQ ID NO: 23 | is the determined cDNA sequence for clone | ‘58153.1’ |
| SEQ ID NO: 24 | is the determined cDNA sequence for clone | ‘58154.1’ |
| SEQ ID NO: 25 | is the determined cDNA sequence for clone | ‘58155.1’ |
| SEQ ID NO: 26 | is the determined cDNA sequence for clone | ‘58156.1’ |
| SEQ ID NO: 27 | is the determined cDNA sequence for clone | ‘58159.1’ |
| SEQ ID NO: 28 | is the determined cDNA sequence for clone | ‘58161.1’ |
| SEQ ID NO: 29 | is the determined cDNA sequence for clone | ‘58163.1’ |
| SEQ ID NO: 30 | is the determined cDNA sequence for clone | ‘58164.1’ |
| SEQ ID NO: 31 | is the determined cDNA sequence for clone | ‘58165.1’ |
| SEQ ID NO: 32 | is the determined cDNA sequence for clone | ‘58166.1’ |
| SEQ ID NO: 33 | is the determined cDNA sequence for clone | ‘58167.1’ |
| SEQ ID NO: 34 | is the determined cDNA sequence for clone | ‘58169.1’ |
| SEQ ID NO: 35 | is the determined cDNA sequence for clone | ‘58170.1’ |
| SEQ ID NO: 36 | is the determined cDNA sequence for clone | ‘58171.1’ |
| SEQ ID NO: 37 | is the determined cDNA sequence for clone | ‘58172.1’ |
| SEQ ID NO: 38 | is the determined cDNA sequence for clone | ‘58174.1’ |
| SEQ ID NO: 39 | is the determined cDNA sequence for clone | ‘58176.1’ |
| SEQ ID NO: 40 | is the determined cDNA sequence for clone | ‘58177.1’ |
| SEQ ID NO: 41 | is the determined cDNA sequence for clone | ‘58178.1’ |
| SEQ ID NO: 42 | is the determined cDNA sequence for clone | ‘58183.1’ |
| SEQ ID NO: 43 | is the determined cDNA sequence for clone | ‘58185.1’ |
| SEQ ID NO: 44 | is the determined cDNA sequence for clone | ‘58186.1’ |
| SEQ ID NO: 45 | is the determined cDNA sequence for clone | ‘58189.1’ |
| SEQ ID NO: 46 | is the determined cDNA sequence for clone | ‘58190.1’ |
| SEQ ID NO: 47 | is the determined cDNA sequence for clone | ‘58194.1’ |
| SEQ ID NO: 48 | is the determined cDNA sequence for clone | ‘58196.1’ |
| SEQ ID NO: 49 | is the determined cDNA sequence for clone | ‘58203.1’ |
| SEQ ID NO: 50 | is the determined cDNA sequence for clone | ‘58204.1’ |
| SEQ ID NO: 51 | is the determined cDNA sequence for clone | ‘58205.1’ |
| SEQ ID NO: 52 | is the determined cDNA sequence for clone | ‘58206.1’ |
| SEQ ID NO: 53 | is the determined cDNA sequence for clone | ‘58208.1’ |
| SEQ ID NO: 54 | is the determined cDNA sequence for clone | ‘58214.1’ |
| SEQ ID NO: 55 | is the determined cDNA sequence for clone | ‘58215.1’ |
| SEQ ID NO: 56 | is the determined cDNA sequence for clone | ‘58216.1’ |
| SEQ ID NO: 57 | is the determined cDNA sequence for clone | ‘58218.1’ |
| SEQ ID NO: 58 | is the determined cDNA sequence for clone | ‘69339.1’ |
| SEQ ID NO: 59 | is the determined cDNA sequence for clone | ‘69340.1’ |
| SEQ ID NO: 60 | is the determined cDNA sequence for clone | ‘69341.1’ |
| SEQ ID NO: 61 | is the determined cDNA sequence for clone | ‘693421’ |
| SEQ ID NO: 62 | is the determined cDNA sequence for clone | ‘69343.1’ |
| SEQ ID NO: 63 | is the determined cDNA sequence for clone | ‘69344.1’ |
| SEQ ID NO: 64 | is the determined cDNA sequence for clone | ‘69345.1’ |
| SEQ ID NO: 65 | is the determined cDNA sequence for clone | ‘69346.1’ |
| SEQ ID NO: 66 | is the determined cDNA sequence for clone | ‘69347.1’ |
| SEQ ID NO: 67 | is the determined cDNA sequence for clone | ‘69348.1’ |
| SEQ ID NO: 68 | is the determined cDNA sequence for clone | ‘69349.1’ |
| SEQ ID NO: 69 | is the determined cDNA sequence for clone | ‘69350.1’ |
| SEQ ID NO: 70 | is the determined cDNA sequence for clone | ‘69351.1’ |
| SEQ ID NO: 71 | is the determined cDNA sequence for clone | ‘69352.1’ |
| SEQ ID NO: 72 | is the determined cDNA sequence for clone | ‘69353.1’ |
| SEQ ID NO: 73 | is the determined cDNA sequence for clone | ‘69354.1’ |
| SEQ ID NO: 74 | is the determined cDNA sequence for clone | ‘69355.1’ |
| SEQ ID NO: 75 | is the determined cDNA sequence for clone | ‘69357.1’ |
| SEQ ID NO: 76 | is the determined cDNA sequence for clone | ‘69358.1’ |
| SEQ ID NO: 77 | is the determined cDNA sequence for clone | ‘69360.1’ |
| SEQ ID NO: 78 | is the determined cDNA sequence for clone | ‘69965.1’ |
| SEQ ID NO: 79 | is the determined cDNA sequence for clone | ‘69966.1’ |
| SEQ ID NO: 80 | is the determined cDNA sequence for clone | ‘69967.1’ |
| SEQ ID NO: 81 | is the determined cDNA sequence for clone | ‘69969.1’ |
| SEQ ID NO: 82 | is the determined cDNA sequence for clone | ‘69970.1’ |
| SEQ ID NO: 83 | is the determined cDNA sequence for clone | ‘69971.1’ |
| SEQ ID NO: 84 | is the determined cDNA sequence for clone | ‘69972.1’ |
| SEQ ID NO: 85 | is the determined cDNA sequence for clone | ‘69974.1’ |
| SEQ ID NO: 86 | is the determined cDNA sequence for clone | ‘69975.1’ |
| SEQ ID NO: 87 | is the determined cDNA sequence for clone | ‘69976.1’ |
| SEQ ID NO: 88 | is the determined cDNA sequence for clone | ‘69977.1’ |
| SEQ ID NO: 89 | is the determined cDNA sequence for clone | ‘69978.1’ |
| SEQ ID NO: 90 | is the determined cDNA sequence for clone | ‘69980.1’ |
| SEQ ID NO: 91 | is the determined cDNA sequence for clone | ‘69981.1’ |
| SEQ ID NO: 92 | is the determined cDNA sequence for clone | ‘69982.1’ |
| SEQ ID NO: 93 | is the determined cDNA sequence for clone | ‘69983.1’ |
| SEQ ID NO: 94 | is the determined cDNA sequence for clone | ‘69984.1’ |
| SEQ ID NO: 95 | is the determined cDNA sequence for clone | ‘69985.1’ |
| SEQ ID NO: 96 | is the determined cDNA sequence for clone | ‘69986.1’ |
| SEQ ID NO: 97 | is the determined cDNA sequence for clone | ‘69987.1’ |
| SEQ ID NO: 98 | is the determined cDNA sequence for clone | ‘69989.1’ |
| SEQ ID NO: 99 | is the determined cDNA sequence for clone | ‘69990.1’ |
| SEQ ID NO: 100 | is the determined cDNA sequence for clone | ‘69991.1’ |
| SEQ ID NO: 101 | is the determined cDNA sequence for clone | ‘69992.1’ |
| SEQ ID NO: 102 | is the determined cDNA sequence for clone | ‘69993.1’ |
| SEQ ID NO: 103 | is the determined cDNA sequence for clone | ‘69994.1’ |
| SEQ ID NO: 104 | is the determined cDNA sequence for clone | ‘69995.1’ |
| SEQ ID NO: 105 | is the determined cDNA sequence for clone | ‘699961’ |
| SEQ ID NO: 106 | is the determined cDNA sequence for clone | ‘69997.1’ |
| SEQ ID NO: 107 | is the determined cDNA sequence for clone | ‘69999.1’ |
| SEQ ID NO: 108 | is the determined cDNA sequence for clone | ‘70000.1’ |
| SEQ ID NO: 109 | is the determined cDNA sequence for clone | ‘70001.1’ |
| SEQ ID NO: 110 | is the determined cDNA sequence for clone | ‘70002.1’ |
| SEQ ID NO: 111 | is the determined cDNA sequence for clone | ‘70003.1’ |
| SEQ ID NO: 112 | is the determined cDNA sequence for clone | ‘70004.1’ |
| SEQ ID NO: 113 | is the determined cDNA sequence for clone | ‘70006.1’ |
| SEQ ID NO: 114 | is the determined cDNA sequence for clone | ‘70007.1’ |
| SEQ ID NO: 115 | is the determined cDNA sequence for clone | ‘70009.1’ |
| SEQ ID NO: 116 | is the determined cDNA sequence for clone | ‘70010.1’ |
| SEQ ID NO: 117 | is the determined cDNA sequence for clone | ‘70011.1’ |
| SEQ ID NO: 118 | is the determined cDNA sequence for clone | ‘70012.1’ |
| SEQ ID NO: 119 | is the determined cDNA sequence for clone | ‘70013.1’ |
| SEQ ID NO: 120 | is the determined cDNA sequence for clone | ‘70015.1’ |
| SEQ ID NO: 121 | is the determined cDNA sequence for clone | ‘70016.1’ |
| SEQ ID NO: 122 | is the determined cDNA sequence for clone | ‘70017.1’ |
| SEQ ID NO: 123 | is the determined cDNA sequence for clone | ‘70018.1’ |
| SEQ ID NO: 124 | is the determined cDNA sequence for clone | ‘70020.1’ |
| SEQ ID NO: 125 | is the determined cDNA sequence for clone | ‘70021.1’ |
| SEQ ID NO: 126 | is the determined cDNA sequence for clone | ‘70022.1’ |
| SEQ ID NO: 127 | is the determined cDNA sequence for clone | ‘70024.1’ |
| SEQ ID NO: 128 | is the determined cDNA sequence for clone | ‘70025.1’ |
| SEQ ID NO: 129 | is the determined cDNA sequence for clone | ‘70026.1’ |
| SEQ ID NO: 130 | is the determined cDNA sequence for clone | ‘70028.1’ |
| SEQ ID NO: 131 | is the determined cDNA sequence for clone | ‘70029.1’ |
| SEQ ID NO: 132 | is the determined cDNA sequence for clone | ‘70030.1’ |
| SEQ ID NO: 133 | is the determined cDNA sequence for clone | ‘70032.1’ |
| SEQ ID NO: 134 | is the determined cDNA sequence for clone | ‘70033.1’ |
| SEQ ID NO: 135 | is the determined cDNA sequence for clone | ‘70034.1’ |
| SEQ ID NO: 136 | is the determined cDNA sequence for clone | ‘70036.1’ |
| SEQ ID NO: 137 | is the determined cDNA sequence for clone | ‘70037.1’ |
| SEQ ID NO: 138 | is the determined cDNA sequence for clone | ‘70038.1’ |
| SEQ ID NO: 139 | is the determined cDNA sequence for clone | ‘70040.1’ |
| SEQ ID NO: 140 | is the determined cDNA sequence for clone | ‘70041.1’ |
| SEQ ID NO: 141 | is the determined cDNA sequence for clone | ‘70044.1’ |
| SEQ ID NO: 142 | is the determined cDNA sequence for clone | ‘70045.1’ |
| SEQ ID NO: 143 | is the determined cDNA sequence for clone | ‘69489.1’ |
| SEQ ID NO: 144 | is the determined cDNA sequence for clone | ‘69490.1’ |
| SEQ ID NO: 145 | is the determined cDNA sequence for clone | ‘69491.1’ |
| SEQ ID NO: 146 | is the determined cDNA sequence for clone | ‘69492.1’ |
| SEQ ID NO: 147 | is the determined cDNA sequence for clone | ‘69493.1’ |
| SEQ ID NO: 148 | is the determined cDNA sequence for clone | ‘69494.1’ |
| SEQ ID NO: 149 | is the determined cDNA sequence for clone | ‘69496.1’ |
| SEQ ID NO: 150 | is the determined cDNA sequence for clone | ‘69497.1’ |
| SEQ ID NO: 151 | is the determined cDNA sequence for clone | ‘69498.1’ |
| SEQ ID NO: 152 | is the determined cDNA sequence for clone | ‘69499.1’ |
| SEQ ID NO: 153 | is the determined cDNA sequence for clone | ‘69500.1’ |
| SEQ ID NO: 154 | is the determined cDNA sequence for clone | ‘69501.1’ |
| SEQ ID NO: 155 | is the determined cDNA sequence for clone | ‘69503.1’ |
| SEQ ID NO: 156 | is the determined cDNA sequence for clone | ‘69505.1’ |
| SEQ ID NO: 157 | is the determined cDNA sequence for clone | ‘69506.1’ |
| SEQ ID NO: 158 | is the determined cDNA sequence for clone | ‘69507.1’ |
| SEQ ID NO: 159 | is the determined cDNA sequence for clone | ‘69508.1’ |
| SEQ ID NO: 160 | is the determined cDNA sequence for clone | ‘69509.1’ |
| SEQ ID NO: 161 | is the determined cDNA sequence for clone | ‘69511.1’ |
| SEQ ID NO: 162 | is the determined cDNA sequence for clone | ‘69512.1’ |
| SEQ ID NO: 163 | is the determined cDNA sequence for clone | ‘69513.1’ |
| SEQ ID NO: 164 | is the determined cDNA sequence for clone | ‘69514.1’ |
| SEQ ID NO: 165 | is the determined cDNA sequence for clone | ‘69516.1’ |
| SEQ ID NO: 166 | is the determined cDNA sequence for clone | ‘69517.1’ |
| SEQ ID NO: 167 | is the determined cDNA sequence for clone | ‘69518.1’ |
| SEQ ID NO: 168 | is the determined cDNA sequence for clone | ‘69520.1’ |
| SEQ ID NO: 169 | is the determined cDNA sequence for clone | ‘69521.1’ |
| SEQ ID NO: 170 | is the determined cDNA sequence for clone | ‘69523.1’ |
| SEQ ID NO: 171 | is the determined cDNA sequence for clone | ‘69524.1’ |
| SEQ ID NO: 172 | is the determined cDNA sequence for clone | ‘69525.1’ |
| SEQ ID NO: 173 | is the determined cDNA sequence for clone | ‘69526.1’ |
| SEQ ID NO: 174 | is the determined cDNA sequence for clone | ‘69527.1’ |
| SEQ ID NO: 175 | is the determined cDNA sequence for clone | ‘69528.1’ |
| SEQ ID NO: 176 | is the determined cDNA sequence for clone | ‘69529.1’ |
| SEQ ID NO: 177 | is the determined cDNA sequence for clone | ‘69530.1’ |
| SEQ ID NO: 178 | is the determined cDNA sequence for clone | ‘70019.1’ |
| SEQ ID NO: 179 | is the determined cDNA sequence for clone | ‘70023.1’ |
| SEQ ID NO: 180 | is the determined cDNA sequence for clone | ‘70035.1’ |
| SEQ ID NO: 181 | is the determined cDNA sequence for clone | ‘70039.1’ |
| SEQ ID NO: 182 | is the determined cDNA sequence for clone | ‘70046.1’ |
| SEQ ID NO: 183 | is the determined cDNA sequence for clone | ‘70047.1’ |
| SEQ ID NO: 184 | is the determined cDNA sequence for clone | ‘70048.1’ |
| SEQ ID NO: 185 | is the determined cDNA sequence for clone | ‘70049.1’ |
| SEQ ID NO: 186 | is the determined cDNA sequence for clone | ‘70050.1’ |
| SEQ ID NO: 187 | is the determined cDNA sequence for clone | ‘70051.1’ |
| SEQ ID NO: 188 | is the determined cDNA sequence for clone | ‘70052.1’ |
| SEQ ID NO: 189 | is the determined cDNA sequence for clone | ‘70053.1’ |
| SEQ ID NO: 190 | is the determined cDNA sequence for clone | ‘70054.1’ |
| SEQ ID NO: 191 | is the determined cDNA sequence for clone | ‘70055.1’ |
| SEQ ID NO: 192 | is the determined cDNA sequence for clone | ‘700581’ |
| SEQ ID NO: 193 | is the determined cDNA sequence for clone | ‘70059.1’ |
| SEQ ID NO: 194 | is the determined cDNA sequence for clone | ‘70060.1’ |
| SEQ ID NO: 195 | is the determined cDNA sequence for clone | ‘70061.1’ |
| SEQ ID NO: 196 | is the determined cDNA sequence for clone | ‘70064.1’ |
| SEQ ID NO: 197 | is the determined cDNA sequence for clone | ‘70065.1’ |
| SEQ ID NO: 198 | is the determined cDNA sequence for clone | ‘70066.1’ |
| SEQ ID NO: 199 | is the determined cDNA sequence for clone | ‘70067.1’ |
| SEQ ID NO: 200 | is the determined cDNA sequence for clone | ‘70068.1’ |
| SEQ ID NO: 201 | is the determined cDNA sequence for clone | ‘70069.1’ |
| SEQ ID NO: 202 | is the determined cDNA sequence for clone | ‘70070.1’ |
| SEQ ID NO: 203 | is the determined cDNA sequence for clone | ‘70071.1’ |
| SEQ ID NO: 204 | is the determined cDNA sequence for clone | ‘70072.1’ |
| SEQ ID NO: 205 | is the determined cDNA sequence for clone | ‘70073.1’ |
| SEQ ID NO: 206 | is the determined cDNA sequence for clone | ‘70074.1’ |
| SEQ ID NO: 207 | is the determined cDNA sequence for clone | ‘70075.1’ |
| SEQ ID NO: 208 | is the determined cDNA sequence for clone | ‘70077.1’ |
| SEQ ID NO: 209 | is the determined cDNA sequence for clone | ‘70078.1’ |
| SEQ ID NO: 210 | is the determined cDNA sequence for clone | ‘70079.1’ |
| SEQ ID NO: 211 | is the determined cDNA sequence for clone | ‘70144.1’ |
| SEQ ID NO: 212 | is the determined cDNA sequence for clone | ‘70145.1’ |
| SEQ ID NO: 213 | is the determined cDNA sequence for clone | ‘70146.1’ |
| SEQ ID NO: 214 | is the determined cDNA sequence for clone | ‘70147.1’ |
| SEQ ID NO: 215 | is the determined cDNA sequence for clone | ‘70148.1’ |
| SEQ ID NO: 216 | is the determined cDNA sequence for clone | ‘70149.1’ |
| SEQ ID NO: 217 | is the determined cDNA sequence for clone | ‘70150.1’ |
| SEQ ID NO: 218 | is the determined cDNA sequence for clone | ‘70151.1’ |
| SEQ ID NO: 219 | is the determined cDNA sequence for clone | ‘70152.1’ |
| SEQ ID NO: 220 | is the determined cDNA sequence for clone | ‘70153.1’ |
| SEQ ID NO: 221 | is the determined cDNA sequence for clone | ‘70154.1’ |
| SEQ ID NO: 222 | is the determined cDNA sequence for clone | ‘70155.1’ |
| SEQ ID NO: 223 | is the determined cDNA sequence for clone | ‘70158.1’ |
| SEQ ID NO: 224 | is the determined cDNA sequence for clone | ‘70159.1’ |
| SEQ ID NO: 225 | is the determined cDNA sequence for clone | ‘70160.1’ |
| SEQ ID NO: 226 | is the determined cDNA sequence for clone | ‘70161.1’ |
| SEQ ID NO: 227 | is the determined cDNA sequence for clone | ‘70162.1’ |
| SEQ ID NO: 228 | is the determined cDNA sequence for clone | ‘70163.1’ |
| SEQ ID NO: 229 | is the determined cDNA sequence for clone | ‘70165.1’ |
| SEQ ID NO: 230 | is the determined cDNA sequence for clone | 63690041 R0663:A02 |
| SEQ ID NO: 231 | is the determined cDNA sequence for clone | 63690042 R0663:A03 |
| SEQ ID NO: 232 | is the determined cDNA sequence for clone | 63690043 R0663:A05 |
| SEQ ID NO: 233 | is the determined cDNA sequence for clone | 63690045 R0663:A07 |
| SEQ ID NO: 234 | is the determined cDNA sequence for clone | 63690046 R0663:A08 |
| SEQ ID NO: 235 | is the determined cDNA sequence for clone | 63690047 R0663:A09 |
| SEQ ID NO: 236 | is the determined cDNA sequence for clone | 63690048 R0663:A10 |
| SEQ ID NO: 237 | is the determined cDNA sequence for clone | 63690049 R0663:A11 |
| SEQ ID NO: 238 | is the determined cDNA sequence for clone | 63690050 R0663:A12 |
| SEQ ID NO: 239 | is the determined cDNA sequence for clone | 63690051 R0663:B01 |
| SEQ ID NO: 240 | is the determined cDNA sequence for clone | 63690052 R0663:B02 |
| SEQ ID NO: 241 | is the determined cDNA sequence for clone | 63690053 R0663:B03 |
| SEQ ID NO: 242 | is the determined cDNA sequence for clone | 63690054 R0663:B04 |
| SEQ ID NO: 243 | is the determined cDNA sequence for clone | 63690055 R0663:B05 |
| SEQ ID NO: 244 | is the determined cDNA sequence for clone | 63690056 R0663:B06 |
| SEQ ID NO: 245 | is the determined cDNA sequence for clone | 63690057 R0663:B07 |
| SEQ ID NO: 246 | is the determined cDNA sequence for clone | 63690058 R0663:B08 |
| SEQ ID NO: 247 | is the determined cDNA sequence for clone | 63690059 R0663:B09 |
| SEQ ID NO: 248 | is the determined cDNA sequence for clone | 63690061 R0663:B11 |
| SEQ ID NO: 249 | is the determined cDNA sequence for clone | 63690062 R0663:B12 |
| SEQ ID NO: 250 | is the determined cDNA sequence for clone | 63690063 R0663:C01 |
| SEQ ID NO: 251 | is the determined cDNA sequence for clone | 63690065 R0663:C03 |
| SEQ ID NO: 252 | is the determined cDNA sequence for clone | 63690066 R0663:C04 |
| SEQ ID NO: 253 | is the determined cDNA sequence for clone | 63690067 R0663:C05 |
| SEQ ID NO: 254 | is the determined cDNA sequence for clone | 63690068 R0663:C06 |
| SEQ ID NO: 255 | is the determined cDNA sequence for clone | 63690069 R0663:C07 |
| SEQ ID NO: 256 | is the determined cDNA sequence for clone | 63690070 R0663:C08 |
| SEQ ID NO: 257 | is the determined cDNA sequence for clone | 63690071 R0663:C09 |
| SEQ ID NO: 258 | is the determined cDNA sequence for clone | 63690072 R0663:C10 |
| SEQ ID NO: 259 | is the determined cDNA sequence for clone | 63690073 R0663:C11 |
| SEQ ID NO: 260 | is the determined cDNA sequence for clone | 63690074 R0663:C12 |
| SEQ ID NO: 261 | is the determined cDNA sequence for clone | 63690075 R0663:D01 |
| SEQ ID NO: 262 | is the determined cDNA sequence for clone | 63690077 R0663:D03 |
| SEQ ID NO: 263 | is the determined cDNA sequence for clone | 63690078 R0663:D04 |
| SEQ ID NO: 264 | is the determined cDNA sequence for clone | 63690079 R0663:D05 |
| SEQ ID NO: 265 | is the determined cDNA sequence for clone | 63690080 R0663:D06 |
| SEQ ID NO: 266 | is the determined cDNA sequence for clone | 63690081 R0663:D07 |
| SEQ ID NO: 267 | is the determined cDNA sequence for clone | 63690082 R0663:D08 |
| SEQ ID NO: 268 | is the determined cDNA sequence for clone | 63690083 R0663:D09 |
| SEQ ID NO: 269 | is the determined cDNA sequence for clone | 63690084 R0663:D10 |
| SEQ ID NO: 270 | is the determined cDNA sequence for clone | 63690085 R0663:D11 |
| SEQ ID NO: 271 | is the determined cDNA sequence for clone | 63690086 R0663:D12 |
| SEQ ID NO: 272 | is the determined cDNA sequence for clone | 63690087 R0663:E01 |
| SEQ ID NO: 273 | is the determined cDNA sequence for clone | 63690088 R0663:E02 |
| SEQ ID NO: 274 | is the determined cDNA sequence for clone | 63690089 R0663:E03 |
| SEQ ID NO: 275 | is the determined cDNA sequence for clone | 63690090 R0663:E04 |
| SEQ ID NO: 276 | is the determined cDNA sequence for clone | 63690091 R0663:E05 |
| SEQ ID NO: 277 | is the determined cDNA sequence for clone | 63690092 R0663:E06 |
| SEQ ID NO: 278 | is the determined cDNA sequence for clone | 63690094 R0663:E08 |
| SEQ ID NO: 279 | is the determined cDNA sequence for clone | 63690095 R0663:E09 |
| SEQ ID NO: 280 | is the determined cDNA sequence for clone | 63690096 R0663:E10 |
| SEQ ID NO: 281 | is the determined cDNA sequence for clone | 63690097 R0663:E11 |
| SEQ ID NO: 282 | is the determined cDNA sequence for clone | 63690098 R0663:E12 |
| SEQ ID NO: 283 | is the determined cDNA sequence for clone | 63690099 R0663:F01 |
| SEQ ID NO: 284 | is the determined cDNA sequence for clone | 63690100 R0663:F02 |
| SEQ ID NO: 285 | is the determined cDNA sequence for clone | 63690101 R0663:F03 |
| SEQ ID NO: 286 | is the determined cDNA sequence for clone | 63690102 R0663:F04 |
| SEQ ID NO: 287 | is the determined cDNA sequence for clone | 63690104 R0663:F06 |
| SEQ ID NO: 288 | is the determined cDNA sequence for clone | 63690105 R0663:F07 |
| SEQ ID NO: 289 | is the determined cDNA sequence for clone | 63690106 R0663:F08 |
| SEQ ID NO: 290 | is the determined cDNA sequence for clone | 63690107 R0663:F09 |
| SEQ ID NO: 291 | is the determined cDNA sequence for clone | 63690108 R0663:F10 |
| SEQ ID NO: 292 | is the determined cDNA sequence for clone | 63690109 R0663:F11 |
| SEQ ID NO: 293 | is the determined cDNA sequence for clone | 63690110 R0663:F12 |
| SEQ ID NO: 294 | is the determined cDNA sequence for clone | 63690111 R0663:G01 |
| SEQ ID NO: 295 | is the determined cDNA sequence for clone | 63690112 R0663:G02 |
| SEQ ID NO: 296 | is the determined cDNA sequence for clone | 63690114 R0663:G04 |
| SEQ ID NO: 297 | is the determined cDNA sequence for clone | 63690115 R0663:G05 |
| SEQ ID NO: 298 | is the determined cDNA sequence for clone | 63690116 R0663:G06 |
| SEQ ID NO: 299 | is the determined cDNA sequence for clone | 63690117 R0663:G07 |
| SEQ ID NO: 300 | is the determined cDNA sequence for clone | 63690118 R0663:G08 |
| SEQ ID NO: 301 | is the determined cDNA sequence for clone | 63690119 R0663:G09 |
| SEQ ID NO: 302 | is the determined cDNA sequence for clone | 63690121 R0663:G11 |
| SEQ ID NO: 303 | is the determined cDNA sequence for clone | 63690122 R0663:G12 |
| SEQ ID NO: 304 | is the determined cDNA sequence for clone | 63690123 R0663:H01 |
| SEQ ID NO: 305 | is the determined cDNA sequence for clone | 63690124 R0663:H02 |
| SEQ ID NO: 306 | is the determined cDNA sequence for clone | 63690125 R0663:H03 |
| SEQ ID NO: 307 | is the determined cDNA sequence for clone | 63690126 R0663:H04 |
| SEQ ID NO: 308 | is the determined cDNA sequence for clone | 63690127 R0663:H05 |
| SEQ ID NO: 309 | is the determined cDNA sequence for clone | 63690128 R0663:H06 |
| SEQ ID NO: 310 | is the determined cDNA sequence for clone | 63690129 R0663:H07 |
| SEQ ID NO: 311 | is the determined cDNA sequence for clone | 63690130 R0663:H08 |
| SEQ ID NO: 312 | is the determined cDNA sequence for clone | 63690131 R0663:H09 |
| SEQ ID NO: 313 | is the determined cDNA sequence for clone | 63690132 R0663:H10 |
| SEQ ID NO: 314 | is the determined cDNA sequence for clone | 63690133 R0663:H11 |
| SEQ ID NO: 315 | is the determined cDNA sequence for clone | 63689948 R0664:A02 |
| SEQ ID NO: 316 | is the determined cDNA sequence for clone | 63689949 R0664:A03 |
| SEQ ID NO: 317 | is the determined cDNA sequence for clone | 63689950 R0664:A05 |
| SEQ ID NO: 318 | is the determined cDNA sequence for clone | 63689951 R0664:A06 |
| SEQ ID NO: 319 | is the determined cDNA sequence for clone | 63689952 R0664:A07 |
| SEQ ID NO: 320 | is the determined cDNA sequence for clone | 63689953 R0664:A08 |
| SEQ ID NO: 321 | is the determined cDNA sequence for clone | 63689954 R0664:A09 |
| SEQ ID NO: 322 | is the determined cDNA sequence for clone | 63689956 R0664:A11 |
| SEQ ID NO: 323 | is the determined cDNA sequence for clone | 63689957 R0664:A12 |
| SEQ ID NO: 324 | is the determined cDNA sequence for clone | 63689959 R0664:B02 |
| SEQ ID NO: 325 | is the determined cDNA sequence for clone | 63689961 R0664:B04 |
| SEQ ID NO: 326 | is the determined cDNA sequence for clone | 63689962 R0664:B05 |
| SEQ ID NO: 327 | is the determined cDNA sequence for clone | 63689963 R0664:B06 |
| SEQ ID NO: 328 | is the determined cDNA sequence for clone | 63689964 R0664:B07 |
| SEQ ID NO: 329 | is the determined cDNA sequence for clone | 63689965 R0664:B08 |
| SEQ ID NO: 330 | is the determined cDNA sequence for clone | 63689966 R0664:B09 |
| SEQ ID NO: 331 | is the determined cDNA sequence for clone | 63689967 R0664:B10 |
| SEQ ID NO: 332 | is the determined cDNA sequence for clone | 63689968 R0664:B11 |
| SEQ ID NO: 333 | is the determined cDNA sequence for clone | 63689969 R0664:B12 |
| SEQ ID NO: 334 | is the determined cDNA sequence for clone | 63689970 R0664:C01 |
| SEQ ID NO: 335 | is the determined cDNA sequence for clone | 63689972 R0664:C03 |
| SEQ ID NO: 336 | is the determined cDNA sequence for clone | 63689973 R0664:C04 |
| SEQ ID NO: 337 | is the determined cDNA sequence for clone | 63689974 R0664:C05 |
| SEQ ID NO: 338 | is the determined cDNA sequence for clone | 63689975 R0664:C06 |
| SEQ ID NO: 339 | is the determined cDNA sequence for clone | 63689976 R0664:C07 |
| SEQ ID NO: 340 | is the determined cDNA sequence for clone | 63689977 R0664:C08 |
| SEQ ID NO: 341 | is the determined cDNA sequence for clone | 63689978 R0664:C09 |
| SEQ ID NO: 342 | is the determined cDNA sequence for clone | 63689979 R0664:C10 |
| SEQ ID NO: 343 | is the determined cDNA sequence for clone | 63689980 R0664:C11 |
| SEQ ID NO: 344 | is the determined cDNA sequence for clone | 63689981 R0664:C12 |
| SEQ ID NO: 345 | is the determined cDNA sequence for clone | 63689982 R0664:D01 |
| SEQ ID NO: 346 | is the determined cDNA sequence for clone | 63689983 R0664:D02 |
| SEQ ID NO: 347 | is the determined cDNA sequence for clone | 63689984 R0664:D03 |
| SEQ ID NO: 348 | is the determined cDNA sequence for clone | 63689985 R0664:D04 |
| SEQ ID NO: 349 | is the determined cDNA sequence for clone | 63689986 R0664:D05 |
| SEQ ID NO: 350 | is the determined cDNA sequence for clone | 63689987 R0664:D06 |
| SEQ ID NO: 351 | is the determined cDNA sequence for clone | 63689988 R0664:D07 |
| SEQ ID NO: 352 | is the determined cDNA sequence for clone | 63689990 R0664:D09 |
| SEQ ID NO: 353 | is the determined cDNA sequence for clone | 63689992 R0664:D11 |
| SEQ ID NO: 354 | is the determined cDNA sequence for clone | 63689993 R0664:D12 |
| SEQ ID NO: 355 | is the determined cDNA sequence for clone | 63689994 R0664:E01 |
| SEQ ID NO: 356 | is the determined cDNA sequence for clone | 63689995 R0664:E02 |
| SEQ ID NO: 357 | is the determined cDNA sequence for clone | 63689996 R0664:E03 |
| SEQ ID NO: 358 | is the determined cDNA sequence for clone | 63689997 R0664:E04 |
| SEQ ID NO: 359 | is the determined cDNA sequence for clone | 63689998 R0664:E05 |
| SEQ ID NO: 360 | is the determined cDNA sequence for clone | 63689999 R0664:E06 |
| SEQ ID NO: 361 | is the determined cDNA sequence for clone | 63690000 R0664:E07 |
| SEQ ID NO: 362 | is the determined cDNA sequence for clone | 63690001 R0664:E08 |
| SEQ ID NO: 363 | is the determined cDNA sequence for clone | 63690002 R0664:E09 |
| SEQ ID NO: 364 | is the determined cDNA sequence for clone | 63690003 R0664:E10 |
| SEQ ID NO: 365 | is the determined cDNA sequence for clone | 63690004 R0664:E11 |
| SEQ ID NO: 366 | is the determined cDNA sequence for clone | 63690006 R0664:F01 |
| SEQ ID NO: 367 | is the determined cDNA sequence for clone | 63690007 R0664:F02 |
| SEQ ID NO: 368 | is the determined cDNA sequence for clone | 63690008 R0664:F03 |
| SEQ ID NO: 369 | is the determined cDNA sequence for clone | 63690009 R0664:F04 |
| SEQ ID NO: 370 | is the determined cDNA sequence for clone | 63690010 R0664:F05 |
| SEQ ID NO: 371 | is the determined cDNA sequence for clone | 63690011 R0664:F06 |
| SEQ ID NO: 372 | is the determined cDNA sequence for clone | 63690012 R0664:F07 |
| SEQ ID NO: 373 | is the determined cDNA sequence for clone | 63690013 R0664:F08 |
| SEQ ID NO: 374 | is the determined cDNA sequence for clone | 63690014 R0664:F09 |
| SEQ ID NO: 375 | is the determined cDNA sequence for clone | 63690015 R0664:F10 |
| SEQ ID NO: 376 | is the determined cDNA sequence for clone | 63690016 R0664:F11 |
| SEQ ID NO: 377 | is the determined cDNA sequence for clone | 63690017 R0664:F12 |
| SEQ ID NO: 378 | is the determined cDNA sequence for clone | 63690030 R0664:H01 |
| SEQ ID NO: 379 | is the determined cDNA sequence for clone | 63690031 R0664:H02 |
| SEQ ID NO: 380 | is the determined cDNA sequence for clone | 63690032 R0664:H03 |
| SEQ ID NO: 381 | is the determined cDNA sequence for clone | 63690033 R0664:H04 |
| SEQ ID NO: 382 | is the determined cDNA sequence for clone | 63690034 R0664:H05 |
| SEQ ID NO: 383 | is the determined cDNA sequence for clone | 63690035 R0664:H06 |
| SEQ ID NO: 384 | is the determined cDNA sequence for clone | 63690037 R0664:H08 |
| SEQ ID NO: 385 | is the determined cDNA sequence for clone | 63690038 R0664:H09 |
| SEQ ID NO: 386 | is the determined cDNA sequence for clone | 63690040 R0664:H11 |
| SEQ ID NO: 387 | is the determined cDNA sequence for clone | 63689762 R0665:A02 |
| SEQ ID NO: 388 | is the determined cDNA sequence for clone | 63689763 R0665:A03 |
| SEQ ID NO: 389 | is the determined cDNA sequence for clone | 63689764 R0665:A05 |
| SEQ ID NO: 390 | is the determined cDNA sequence for clone | 63689765 R0665:A06 |
| SEQ ID NO: 391 | is the determined cDNA sequence for clone | 63689766 R0665:A07 |
| SEQ ID NO: 392 | is the determined cDNA sequence for clone | 63689767 R0665:A08 |
| SEQ ID NO: 393 | is the determined cDNA sequence for clone | 63689768 R0665:A09 |
| SEQ ID NO: 394 | is the determined cDNA sequence for clone | 63689769 R0665:A10 |
| SEQ ID NO: 395 | is the determined cDNA sequence for clone | 63689770 R0665:A11 |
| SEQ ID NO: 396 | is the determined cDNA sequence for clone | 63689771 R0665:A12 |
| SEQ ID NO: 397 | is the determined cDNA sequence for clone | 63689772 R0665:B01 |
| SEQ ID NO: 398 | is the determined cDNA sequence for clone | 63689773 R0665:B02 |
| SEQ ID NO: 399 | is the determined cDNA sequence for clone | 63689774 R0665:B03 |
| SEQ ID NO: 400 | is the determined cDNA sequence for clone | 63689775 R0665:B04 |
| SEQ ID NO: 401 | is the determined cDNA sequence for clone | 63689777 R0665:B06 |
| SEQ ID NO: 402 | is the determined cDNA sequence for clone | 63689778 R0665:B07 |
| SEQ ID NO: 403 | is the determined cDNA sequence for clone | 63689780 R0665:B09 |
| SEQ ID NO: 404 | is the determined cDNA sequence for clone | 63689781 R0665:B10 |
| SEQ ID NO: 405 | is the determined cDNA sequence for clone | 63689782 R0665:B11 |
| SEQ ID NO: 406 | is the determined cDNA sequence for clone | 63689783 R0665:B12 |
| SEQ ID NO: 407 | is the determined cDNA sequence for clone | 63689784 R0665:C01 |
| SEQ ID NO: 408 | is the determined cDNA sequence for clone | 63689785 R0665:C02 |
| SEQ ID NO: 409 | is the determined cDNA sequence for clone | 63689786 R0665:C03 |
| SEQ ID NO: 410 | is the determined cDNA sequence for clone | 63689788 R0665:C05 |
| SEQ ID NO: 411 | is the determined cDNA sequence for clone | 63689789 R0665:C06 |
| SEQ ID NO: 412 | is the determined cDNA sequence for clone | 63689790 R0665:C07 |
| SEQ ID NO: 413 | is the determined cDNA sequence for clone | 63689791 R0665:C08 |
| SEQ ID NO: 414 | is the determined cDNA sequence for clone | 63689792 R0665:C09 |
| SEQ ID NO: 415 | is the determined cDNA sequence for clone | 63689793 R0665:C10 |
| SEQ ID NO: 416 | is the determined cDNA sequence for clone | 63689794 R0665:C11 |
| SEQ ID NO: 417 | is the determined cDNA sequence for clone | 63689795 R0665:C12 |
| SEQ ID NO: 418 | is the determined cDNA sequence for clone | 63689797 R0665:D02 |
| SEQ ID NO: 419 | is the determined cDNA sequence for clone | 63689798 R0665:D03 |
| SEQ ID NO: 420 | is the determined cDNA sequence for clone | 63689799 R0665:D04 |
| SEQ ID NO: 421 | is the determined cDNA sequence for clone | 63689801 R0665:D06 |
| SEQ ID NO: 422 | is the determined cDNA sequence for clone | 63689802 R0665:D07 |
| SEQ ID NO: 423 | is the determined cDNA sequence for clone | 63689804 R0665:D09 |
| SEQ ID NO: 424 | is the determined cDNA sequence for clone | 63689805 R0665:D10 |
| SEQ ID NO: 425 | is the determined cDNA sequence for clone | 63689806 R0665:D11 |
| SEQ ID NO: 426 | is the determined cDNA sequence for clone | 63689807 R0665:D12 |
| SEQ ID NO: 427 | is the determined cDNA sequence for clone | 63689808 R0665:E01 |
| SEQ ID NO: 428 | is the determined cDNA sequence for clone | 63689809 R0665:E02 |
| SEQ ID NO: 429 | is the determined cDNA sequence for clone | 63689810 R0665:E03 |
| SEQ ID NO: 430 | is the determined cDNA sequence for clone | 63689811 R0665:E04 |
| SEQ ID NO: 431 | is the determined cDNA sequence for clone | 63689812 R0665:E05 |
| SEQ ID NO: 432 | is the determined cDNA sequence for clone | 63689813 R0665:E06 |
| SEQ ID NO: 433 | is the determined cDNA sequence for clone | 63689814 R0665:E07 |
| SEQ ID NO: 434 | is the determined cDNA sequence for clone | 63689815 R0665:E08 |
| SEQ ID NO: 435 | is the determined cDNA sequence for clone | 63689816 R0665:E09 |
| SEQ ID NO: 436 | is the determined cDNA sequence for clone | 63689817 R0665:E10 |
| SEQ ID NO: 437 | is the determined cDNA sequence for clone | 63689818 R0665:E11 |
| SEQ ID NO: 438 | is the determined cDNA sequence for clone | 63689819 R0665:E12 |
| SEQ ID NO: 439 | is the determined cDNA sequence for clone | 63689820 R0665:F01 |
| SEQ ID NO: 440 | is the determined cDNA sequence for clone | 63689821 R0665:F02 |
| SEQ ID NO: 441 | is the determined cDNA sequence for clone | 63689824 R0665:F05 |
| SEQ ID NO: 442 | is the determined cDNA sequence for clone | 63689825 R0665:F06 |
| SEQ ID NO: 443 | is the determined cDNA sequence for clone | 63689826 R0665:F07 |
| SEQ ID NO: 444 | is the determined cDNA sequence for clone | 63689827 R0665:F08 |
| SEQ ID NO: 445 | is the determined cDNA sequence for clone | 63689828 R0665:F09 |
| SEQ ID NO: 446 | is the determined cDNA sequence for clone | 63689829 R0665:F10 |
| SEQ ID NO: 447 | is the determined cDNA sequence for clone | 63689830 R0665:F11 |
| SEQ ID NO: 448 | is the determined cDNA sequence for clone | 63689832 R0665:G01 |
| SEQ ID NO: 449 | is the determined cDNA sequence for clone | 63689833 R0665:G02 |
| SEQ ID NO: 450 | is the determined cDNA sequence for clone | 63689834 R0665:G03 |
| SEQ ID NO: 451 | is the determined cDNA sequence for clone | 63689837 R0665:G06 |
| SEQ ID NO: 452 | is the determined cDNA sequence for clone | 63689838 R0665:G07 |
| SEQ ID NO: 453 | is the determined cDNA sequence for clone | 63689839 R0665:G08 |
| SEQ ID NO: 454 | is the determined cDNA sequence for clone | 63689840 R0665:G09 |
| SEQ ID NO: 455 | is the determined cDNA sequence for clone | 63689842 R0665:G11 |
| SEQ ID NO: 456 | is the determined cDNA sequence for clone | 63689843 R0665:G12 |
| SEQ ID NO: 457 | is the determined cDNA sequence for clone | 63689845 R0665:H02 |
| SEQ ID NO: 458 | is the determined cDNA sequence for clone | 63689846 R0665:H03 |
| SEQ ID NO: 459 | is the determined cDNA sequence for clone | 63689847 R0665:H04 |
| SEQ ID NO: 460 | is the determined cDNA sequence for clone | 63689848 R0665:H05 |
| SEQ ID NO: 461 | is the determined cDNA sequence for clone | 63689849 R0665:H06 |
| SEQ ID NO: 462 | is the determined cDNA sequence for clone | 63689850 R0665:H07 |
| SEQ ID NO: 463 | is the determined cDNA sequence for clone | 63689851 R0665:H08 |
| SEQ ID NO: 464 | is the determined cDNA sequence for clone | 63689852 R0665:H09 |
| SEQ ID NO: 465 | is the determined cDNA sequence for clone | 63689853 R0665:H10 |
| SEQ ID NO: 466 | is the determined cDNA sequence for clone | 63689854 R0665:H11 |
| SEQ ID NO: 467 | is the determined cDNA sequence for clone | 63689577 R0666:A03 |
| SEQ ID NO: 468 | is the determined cDNA sequence for clone | 63689578 R0666:A05 |
| SEQ ID NO: 469 | is the determined cDNA sequence for clone | 63689579 R0666:A06 |
| SEQ ID NO: 470 | is the determined cDNA sequence for clone | 63689580 R0666:A07 |
| SEQ ID NO: 471 | is the determined cDNA sequence for clone | 63689581 R0666:A08 |
| SEQ ID NO: 472 | is the determined cDNA sequence for clone | 63689582 R0666:A09 |
| SEQ ID NO: 473 | is the determined cDNA sequence for clone | 63689583 R0666:A10 |
| SEQ ID NO: 474 | is the determined cDNA sequence for clone | 63689584 R0666:A11 |
| SEQ ID NO: 475 | is the determined cDNA sequence for clone | 63689585 R0666:A12 |
| SEQ ID NO: 476 | is the determined cDNA sequence for clone | 63689586 R0666:B01 |
| SEQ ID NO: 477 | is the determined cDNA sequence for clone | 63689587 R0666:B02 |
| SEQ ID NO: 478 | is the determined cDNA sequence for clone | 63689590 R0666:B05 |
| SEQ ID NO: 479 | is the determined cDNA sequence for clone | 63689591 R0666:B06 |
| SEQ ID NO: 480 | is the determined cDNA sequence for clone | 63689592 R0666:B07 |
| SEQ ID NO: 481 | is the determined cDNA sequence for clone | 63689593 R0666:B08 |
| SEQ ID NO: 482 | is the determined cDNA sequence for clone | 63689594 R0666:B09 |
| SEQ ID NO: 483 | is the determined cDNA sequence for clone | 63689595 R0666:B10 |
| SEQ ID NO: 484 | is the determined cDNA sequence for clone | 63689596 R0666:B11 |
| SEQ ID NO: 485 | is the determined cDNA sequence for clone | 63689598 R0666:C01 |
| SEQ ID NO: 486 | is the determined cDNA sequence for clone | 63689600 R0666:C03 |
| SEQ ID NO: 487 | is the determined cDNA sequence for clone | 63689601 R0666:C04 |
| SEQ ID NO: 488 | is the determined cDNA sequence for clone | 63689602 R0666:C05 |
| SEQ ID NO: 489 | is the determined cDNA sequence for clone | 63689603 R0666:C06 |
| SEQ ID NO: 490 | is the determined cDNA sequence for clone | 63689606 R0666:C09 |
| SEQ ID NO: 491 | is the determined cDNA sequence for clone | 63689607 R0666:C10 |
| SEQ ID NO: 492 | is the determined cDNA sequence for clone | 63689608 R0666:C11 |
| SEQ ID NO: 493 | is the determined cDNA sequence for clone | 63689609 R0666:C12 |
| SEQ ID NO: 494 | is the determined cDNA sequence for clone | 63689610 R0666:D01 |
| SEQ ID NO: 495 | is the determined cDNA sequence for clone | 63689611 R0666:D02 |
| SEQ ID NO: 496 | is the determined cDNA sequence for clone | 63689612 R0666:D03 |
| SEQ ID NO: 497 | is the determined cDNA sequence for clone | 63689613 R0666:D04 |
| SEQ ID NO: 498 | is the determined cDNA sequence for clone | 63689614 R0666:D05 |
| SEQ ID NO: 499 | is the determined cDNA sequence for clone | 63689615 R0666:D06 |
| SEQ ID NO: 500 | is the determined cDNA sequence for clone | 63689616 R0666:D07 |
| SEQ ID NO: 501 | is the determined cDNA sequence for clone | 63689617 R0666:D08 |
| SEQ ID NO: 502 | is the determined cDNA sequence for clone | 63689618 R0666:D09 |
| SEQ ID NO: 503 | is the determined cDNA sequence for clone | 63689619 R0666:D10 |
| SEQ ID NO: 504 | is the determined cDNA sequence for clone | 63689620 R0666:D11 |
| SEQ ID NO: 505 | is the determined cDNA sequence for clone | 63689622 R0666:E01 |
| SEQ ID NO: 506 | is the determined cDNA sequence for clone | 63689624 R0666:E03 |
| SEQ ID NO: 507 | is the determined cDNA sequence for clone | 63689625 R0666:E04 |
| SEQ ID NO: 508 | is the determined cDNA sequence for clone | 63689626 R0666:E05 |
| SEQ ID NO: 509 | is the determined cDNA sequence for clone | 63689627 R0666:E06 |
| SEQ ID NO: 510 | is the determined cDNA sequence for clone | 63689628 R0666:E07 |
| SEQ ID NO: 511 | is the determined cDNA sequence for clone | 63689630 R0666:E09 |
| SEQ ID NO: 512 | is the determined cDNA sequence for clone | 63689631 R0666:E10 |
| SEQ ID NO: 513 | is the determined cDNA sequence for clone | 63689632 R0666:E11 |
| SEQ ID NO: 514 | is the determined cDNA sequence for clone | 63689633 R0666:E12 |
| SEQ ID NO: 515 | is the determined cDNA sequence for clone | 63689634 R0666:F01 |
| SEQ ID NO: 516 | is the determined cDNA sequence for clone | 63689635 R0666:F02 |
| SEQ ID NO: 517 | is the determined cDNA sequence for clone | 63689636 R0666:F03 |
| SEQ ID NO: 518 | is the determined cDNA sequence for clone | 63689637 R0666:F04 |
| SEQ ID NO: 519 | is the determined cDNA sequence for clone | 63689638 R0666:F05 |
| SEQ ID NO: 520 | is the determined cDNA sequence for clone | 63689639 R0666:F06 |
| SEQ ID NO: 521 | is the determined cDNA sequence for clone | 63689641 R0666:F08 |
| SEQ ID NO: 522 | is the determined cDNA sequence for clone | 63689642 R0666:F09 |
| SEQ ID NO: 523 | is the determined cDNA sequence for clone | 63689643 R0666:F10 |
| SEQ ID NO: 524 | is the determined cDNA sequence for clone | 63689644 R0666:F11 |
| SEQ ID NO: 525 | is the determined cDNA sequence for clone | 63689645 R0666:F12 |
| SEQ ID NO: 526 | is the determined cDNA sequence for clone | 63689648 R0666:G03 |
| SEQ ID NO: 527 | is the determined cDNA sequence for clone | 63689649 R0666:G04 |
| SEQ ID NO: 528 | is the determined cDNA sequence for clone | 63689650 R0666:G05 |
| SEQ ID NO: 529 | is the determined cDNA sequence for clone | 63689652 R0666:G07 |
| SEQ ID NO: 530 | is the determined cDNA sequence for clone | 63689653 R0666:G08 |
| SEQ ID NO: 531 | is the determined cDNA sequence for clone | 63689654 R0666:G09 |
| SEQ ID NO: 532 | is the determined cDNA sequence for clone | 63689655 R0666:G10 |
| SEQ ID NO: 533 | is the determined cDNA sequence for clone | 63689656 R0666:G11 |
| SEQ ID NO: 534 | is the determined cDNA sequence for clone | 63689658 R0666:H01 |
| SEQ ID NO: 535 | is the determined cDNA sequence for clone | 63689659 R0666:H02 |
| SEQ ID NO: 536 | is the determined cDNA sequence for clone | 63689660 R0666:H03 |
| SEQ ID NO: 537 | is the determined cDNA sequence for clone | 63689661 R0666:H04 |
| SEQ ID NO: 538 | is the determined cDNA sequence for clone | 63689662 R0666:H05 |
| SEQ ID NO: 539 | is the determined cDNA sequence for clone | 63689663 R0666:H06 |
| SEQ ID NO: 540 | is the determined cDNA sequence for clone | 63689664 R0666:H07 |
| SEQ ID NO: 541 | is the determined cDNA sequence for clone | 63689665 R0666:H08 |
| SEQ ID NO: 542 | is the determined cDNA sequence for clone | 63689666 R0666:H09 |
| SEQ ID NO: 543 | is the determined cDNA sequence for clone | 63689667 R0666:H10 |
| SEQ ID NO: 544 | is the determined cDNA sequence for clone | 63689668 R0666:H11 |
| SEQ ID NO: 545 | is the determined cDNA sequence for clone | 63689484 R0667:A03 |
| SEQ ID NO: 546 | is the determined cDNA sequence for clone | 63689485 R0667:A05 |
| SEQ ID NO: 547 | is the determined cDNA sequence for clone | 63689486 R0667:A06 |
| SEQ ID NO: 548 | is the determined cDNA sequence for clone | 63689487 R0667:A07 |
| SEQ ID NO: 549 | is the determined cDNA sequence for clone | 63689488 R0667:A08 |
| SEQ ID NO: 550 | is the determined cDNA sequence for clone | 63689489 R0667:A09 |
| SEQ ID NO: 551 | is the determined cDNA sequence for clone | 63689491 R0667:A11 |
| SEQ ID NO: 552 | is the determined cDNA sequence for clone | 63689492 R0667:A12 |
| SEQ ID NO: 553 | is the determined cDNA sequence for clone | 63689493 R0667:B01 |
| SEQ ID NO: 554 | is the determined cDNA sequence for clone | 63689494 R0667:B02 |
| SEQ ID NO: 555 | is the determined cDNA sequence for clone | 63689495 R0667:B03 |
| SEQ ID NO: 556 | is the determined cDNA sequence for clone | 63689496 R0667:B04 |
| SEQ ID NO: 557 | is the determined cDNA sequence for clone | 63689497 R0667:B05 |
| SEQ ID NO: 558 | is the determined cDNA sequence for clone | 63689498 R0667:B06 |
| SEQ ID NO: 559 | is the determined cDNA sequence for clone | 63689499 R0667:B07 |
| SEQ ID NO: 560 | is the determined cDNA sequence for clone | 63689500 R0667:B08 |
| SEQ ID NO: 561 | is the determined cDNA sequence for clone | 63689501 R0667:B09 |
| SEQ ID NO: 562 | is the determined cDNA sequence for clone | 63689502 R0667:B10 |
| SEQ ID NO: 563 | is the determined cDNA sequence for clone | 63689503 R0667:B11 |
| SEQ ID NO: 564 | is the determined cDNA sequence for clone | 63689504 R0667:B12 |
| SEQ ID NO: 565 | is the determined cDNA sequence for clone | 63689505 R0667:C01 |
| SEQ ID NO: 566 | is the determined cDNA sequence for clone | 63689506 R0667:C02 |
| SEQ ID NO: 567 | is the determined cDNA sequence for clone | 63689507 R0667:C03 |
| SEQ ID NO: 568 | is the determined cDNA sequence for clone | 63689508 R0667:C04 |
| SEQ ID NO: 569 | is the determined cDNA sequence for clone | 63689509 R0667:C05 |
| SEQ ID NO: 570 | is the determined cDNA sequence for clone | 63689511 R0667:C07 |
| SEQ ID NO: 571 | is the determined cDNA sequence for clone | 63689512 R0667:C08 |
| SEQ ID NO: 572 | is the determined cDNA sequence for clone | 63689514 R0667:C10 |
| SEQ ID NO: 573 | is the determined cDNA sequence for clone | 63689515 R0667:C11 |
| SEQ ID NO: 574 | is the determined cDNA sequence for clone | 63689516 R0667:C12 |
| SEQ ID NO: 575 | is the determined cDNA sequence for clone | 63689517 R0667:D01 |
| SEQ ID NO: 576 | is the determined cDNA sequence for clone | 63689518 R0667:D02 |
| SEQ ID NO: 577 | is the determined cDNA sequence for clone | 63689519 R0667:D03 |
| SEQ ID NO: 578 | is the determined cDNA sequence for clone | 63689520 R0667:D04 |
| SEQ ID NO: 579 | is the determined cDNA sequence for clone | 63689521 R0667:D05 |
| SEQ ID NO: 580 | is the determined cDNA sequence for clone | 63689522 R0667:D06 |
| SEQ ID NO: 581 | is the determined cDNA sequence for clone | 63689523 R0667:D07 |
| SEQ ID NO: 582 | is the determined cDNA sequence for clone | 63689524 R0667:D08 |
| SEQ ID NO: 583 | is the determined cDNA sequence for clone | 63689526 R0667:D10 |
| SEQ ID NO: 584 | is the determined cDNA sequence for clone | 63689527 R0667:D11 |
| SEQ ID NO: 585 | is the determined cDNA sequence for clone | 63689528 R0667:D12 |
| SEQ ID NO: 586 | is the determined cDNA sequence for clone | 63689529 R0667:E01 |
| SEQ ID NO: 587 | is the determined cDNA sequence for clone | 63689532 R0667:E04 |
| SEQ ID NO: 588 | is the determined cDNA sequence for clone | 63689533 R0667:E05 |
| SEQ ID NO: 589 | is the determined cDNA sequence for clone | 63689534 R0667:E06 |
| SEQ ID NO: 590 | is the determined cDNA sequence for clone | 63689535 R0667:E07 |
| SEQ ID NO: 591 | is the determined cDNA sequence for clone | 63689536 R0667:E08 |
| SEQ ID NO: 592 | is the determined cDNA sequence for clone | 63689537 R0667:E09 |
| SEQ ID NO: 593 | is the determined cDNA sequence for clone | 63689538 R0667:E10 |
| SEQ ID NO: 594 | is the determined cDNA sequence for clone | 63689539 R0667:E11 |
| SEQ ID NO: 595 | is the determined cDNA sequence for clone | 63689540 R0667:E12 |
| SEQ ID NO: 596 | is the determined cDNA sequence for clone | 63689541 R0667:F01 |
| SEQ ID NO: 597 | is the determined cDNA sequence for clone | 63689542 R0667:F02 |
| SEQ ID NO: 598 | is the determined cDNA sequence for clone | 63689544 R0667:F04 |
| SEQ ID NO: 599 | is the determined cDNA sequence for clone | 63689546 R0667:F06 |
| SEQ ID NO: 600 | is the determined cDNA sequence for clone | 63689547 R0667:F07 |
| SEQ ID NO: 601 | is the determined cDNA sequence for clone | 63689548 R0667:F08 |
| SEQ ID NO: 602 | is the determined cDNA sequence for clone | 63689549 R0667:F09 |
| SEQ ID NO: 603 | is the determined cDNA sequence for clone | 63689550 R0667:F10 |
| SEQ ID NO: 604 | is the determined cDNA sequence for clone | 63689551 R0667:F11 |
| SEQ ID NO: 605 | is the determined cDNA sequence for clone | 63689552 R0667:F12 |
| SEQ ID NO: 606 | is the determined cDNA sequence for clone | 63689553 R0667:G01 |
| SEQ ID NO: 607 | is the determined cDNA sequence for clone | 63689554 R0667:G02 |
| SEQ ID NO: 608 | is the determined cDNA sequence for clone | 63689555 R0667:G03 |
| SEQ ID NO: 609 | is the determined cDNA sequence for clone | 63689557 R0667:G05 |
| SEQ ID NO: 610 | is the determined cDNA sequence for clone | 63689558 R0667:G06 |
| SEQ ID NO: 611 | is the determined cDNA sequence for clone | 63689559 R0667:G07 |
| SEQ ID NO: 612 | is the determined cDNA sequence for clone | 63689560 R0667:G08 |
| SEQ ID NO: 613 | is the determined cDNA sequence for clone | 63689561 R0667:G09 |
| SEQ ID NO: 614 | is the determined cDNA sequence for clone | 63689562 R0667:G10 |
| SEQ ID NO: 615 | is the determined cDNA sequence for clone | 63689563 R0667:G11 |
| SEQ ID NO: 616 | is the determined cDNA sequence for clone | 63689564 R0667:G12 |
| SEQ ID NO: 617 | is the determined cDNA sequence for clone | 63689565 R0667:H01 |
| SEQ ID NO: 618 | is the determined cDNA sequence for clone | 63689566 R0667:H02 |
| SEQ ID NO: 619 | is the determined cDNA sequence for clone | 63689569 R0667:H05 |
| SEQ ID NO: 620 | is the determined cDNA sequence for clone | 63689570 R0667:H06 |
| SEQ ID NO: 621 | is the determined cDNA sequence for clone | 63689571 R0667:H07 |
| SEQ ID NO: 622 | is the determined cDNA sequence for clone | 63689572 R0667:H08 |
| SEQ ID NO: 623 | is the determined cDNA sequence for clone | 63689573 R0667:H09 |
| SEQ ID NO: 624 | is the determined cDNA sequence for clone | 63689574 R0667:H10 |
| SEQ ID NO: 625 | is the determined cDNA sequence for clone | 63689575 R0667:H11 |
| SEQ ID NO: 626 | is the determined cDNA sequence for clone | 63689390 R0668:A02 |
| SEQ ID NO: 627 | is the determined cDNA sequence for clone | 63689391 R0668:A03 |
| SEQ ID NO: 628 | is the determined cDNA sequence for clone | 63689392 R0668:A05 |
| SEQ ID NO: 629 | is the determined cDNA sequence for clone | 63689393 R0668:A06 |
| SEQ ID NO: 630 | is the determined cDNA sequence for clone | 63689394 R0668:A07 |
| SEQ ID NO: 631 | is the determined cDNA sequence for clone | 63689395 R0668:A08 |
| SEQ ID NO: 632 | is the determined cDNA sequence for clone | 63689396 R0668:A09 |
| SEQ ID NO: 633 | is the determined cDNA sequence for clone | 63689397 R0668:A10 |
| SEQ ID NO: 634 | is the determined cDNA sequence for clone | 63689398 R0668:A11 |
| SEQ ID NO: 635 | is the determined cDNA sequence for clone | 63689399 R0668:A12 |
| SEQ ID NO: 636 | is the determined cDNA sequence for clone | 63689401 R0668:B02 |
| SEQ ID NO: 637 | is the determined cDNA sequence for clone | 63689402 R0668:B03 |
| SEQ ID NO: 638 | is the determined cDNA sequence for clone | 63689403 R0668:B04 |
| SEQ ID NO: 639 | is the determined cDNA sequence for clone | 63689404 R0668:B05 |
| SEQ ID NO: 640 | is the determined cDNA sequence for clone | 63689405 R0668:B06 |
| SEQ ID NO: 641 | is the determined cDNA sequence for clone | 63689406 R0668:B07 |
| SEQ ID NO: 642 | is the determined cDNA sequence for clone | 63689407 R0668:B08 |
| SEQ ID NO: 643 | is the determined cDNA sequence for clone | 63689408 R0668:B09 |
| SEQ ID NO: 644 | is the determined cDNA sequence for clone | 63689409 R0668:B10 |
| SEQ ID NO: 645 | is the determined cDNA sequence for clone | 63689410 R0668:B11 |
| SEQ ID NO: 646 | is the determined cDNA sequence for clone | 63689411 R0668:B12 |
| SEQ ID NO: 647 | is the determined cDNA sequence for clone | 63689412 R0668:C01 |
| SEQ ID NO: 648 | is the determined cDNA sequence for clone | 63689413 R0668:C02 |
| SEQ ID NO: 649 | is the determined cDNA sequence for clone | 63689414 R0668:C03 |
| SEQ ID NO: 650 | is the determined cDNA sequence for clone | 63689415 R0668:C04 |
| SEQ ID NO: 651 | is the determined cDNA sequence for clone | 63689416 R0668:C05 |
| SEQ ID NO: 652 | is the determined cDNA sequence for clone | 63689417 R0668:C06 |
| SEQ ID NO: 653 | is the determined cDNA sequence for clone | 63689418 R0668:C07 |
| SEQ ID NO: 654 | is the determined cDNA sequence for clone | 63689419 R0668:C08 |
| SEQ ID NO: 655 | is the determined cDNA sequence for clone | 63689420 R0668:C09 |
| SEQ ID NO: 656 | is the determined cDNA sequence for clone | 63689421 R0668:C10 |
| SEQ ID NO: 657 | is the determined cDNA sequence for clone | 63689422 R0668:C11 |
| SEQ ID NO: 658 | is the determined cDNA sequence for clone | 63689423 R0668:C12 |
| SEQ ID NO: 659 | is the determined cDNA sequence for clone | 63689424 R0668:D01 |
| SEQ ID NO: 660 | is the determined cDNA sequence for clone | 63689425 R0668:D02 |
| SEQ ID NO: 661 | is the determined cDNA sequence for clone | 63689426 R0668:D03 |
| SEQ ID NO: 662 | is the determined cDNA sequence for clone | 63689427 R0668:D04 |
| SEQ ID NO: 663 | is the determined cDNA sequence for clone | 63689428 R0668:D05 |
| SEQ ID NO: 664 | is the determined cDNA sequence for clone | 63689429 R0668:D06 |
| SEQ ID NO: 665 | is the determined cDNA sequence for clone | 63689430 R0668:D07 |
| SEQ ID NO: 666 | is the determined cDNA sequence for clone | 63689431 R0668:D08 |
| SEQ ID NO: 667 | is the determined cDNA sequence for clone | 63689432 R0668:D09 |
| SEQ ID NO: 668 | is the determined cDNA sequence for clone | 63689433 R0668:D10 |
| SEQ ID NO: 669 | is the determined cDNA sequence for clone | 63689434 R0668:D11 |
| SEQ ID NO: 670 | is the determined cDNA sequence for clone | 63689435 R0668:D12 |
| SEQ ID NO: 671 | is the determined cDNA sequence for clone | 63689436 R0668:E01 |
| SEQ ID NO: 672 | is the determined cDNA sequence for clone | 63689437 R0668:E02 |
| SEQ ID NO: 673 | is the determined cDNA sequence for clone | 63689438 R0668:E03 |
| SEQ ID NO: 674 | is the determined cDNA sequence for clone | 63689439 R0668:E04 |
| SEQ ID NO: 675 | is the determined cDNA sequence for clone | 63689440 R0668:E05 |
| SEQ ID NO: 676 | is the determined cDNA sequence for clone | 63689441 R0668:E06 |
| SEQ ID NO: 677 | is the determined cDNA sequence for clone | 63689442 R0668:E07 |
| SEQ ID NO: 678 | is the determined cDNA sequence for clone | 63689443 R0668:E08 |
| SEQ ID NO: 679 | is the determined cDNA sequence for clone | 63689444 R0668:E09 |
| SEQ ID NO: 680 | is the determined cDNA sequence for clone | 63689446 R0668:E11 |
| SEQ ID NO: 681 | is the determined cDNA sequence for clone | 63689447 R0668:E12 |
| SEQ ID NO: 682 | is the determined cDNA sequence for clone | 63689450 R0668:F03 |
| SEQ ID NO: 683 | is the determined cDNA sequence for clone | 63689451 R0668:F04 |
| SEQ ID NO: 684 | is the determined cDNA sequence for clone | 63689452 R0668:F05 |
| SEQ ID NO: 685 | is the determined cDNA sequence for clone | 63689453 R0668:F06 |
| SEQ ID NO: 686 | is the determined cDNA sequence for clone | 63689454 R0668:F07 |
| SEQ ID NO: 687 | is the determined cDNA sequence for clone | 63689455 R0668:F08 |
| SEQ ID NO: 688 | is the determined cDNA sequence for clone | 63689456 R0668:F09 |
| SEQ ID NO: 689 | is the determined cDNA sequence for clone | 63689457 R0668:F10 |
| SEQ ID NO: 690 | is the determined cDNA sequence for clone | 63689458 R0668:F11 |
| SEQ ID NO: 691 | is the determined cDNA sequence for clone | 63689459 R0668:F12 |
| SEQ ID NO: 692 | is the determined cDNA sequence for clone | 63689460 R0668:G01 |
| SEQ ID NO: 693 | is the determined cDNA sequence for clone | 63689461 R0668:G02 |
| SEQ ID NO: 694 | is the determined cDNA sequence for clone | 63689462 R0668:G03 |
| SEQ ID NO: 695 | is the determined cDNA sequence for clone | 63689463 R0668:G04 |
| SEQ ID NO: 696 | is the determined cDNA sequence for clone | 63689464 R0668:G05 |
| SEQ ID NO: 697 | is the determined cDNA sequence for clone | 63689465 R0668:G06 |
| SEQ ID NO: 698 | is the determined cDNA sequence for clone | 63689466 R0668:G07 |
| SEQ ID NO: 699 | is the determined cDNA sequence for clone | 63689467 R0668:G08 |
| SEQ ID NO: 700 | is the determined cDNA sequence for clone | 63689468 R0668:G09 |
| SEQ ID NO: 701 | is the determined cDNA sequence for clone | 63689469 R0668:G10 |
| SEQ ID NO: 702 | is the determined cDNA sequence for clone | 63689470 R0668:G11 |
| SEQ ID NO: 703 | is the determined cDNA sequence for clone | 63689471 R0668:G12 |
| SEQ ID NO: 704 | is the determined cDNA sequence for clone | 63689474 R0668:H03 |
| SEQ ID NO: 705 | is the determined cDNA sequence for clone | 63689476 R0668:H05 |
| SEQ ID NO: 706 | is the determined cDNA sequence for clone | 63689477 R0668:H06 |
| SEQ ID NO: 707 | is the determined cDNA sequence for clone | 63689478 R0668:H07 |
| SEQ ID NO: 708 | is the determined cDNA sequence for clone | 63689479 R0668:H08 |
| SEQ ID NO: 709 | is the determined cDNA sequence for clone | 63689480 R0668:H09 |
| SEQ ID NO: 710 | is the determined cDNA sequence for clone | 63689481 R0668:H10 |
| SEQ ID NO: 711 | is the determined cDNA sequence for clone | 63689482 R0668:H11 |
| SEQ ID NO: 712 | is the determined cDNA sequence for clone | 63690135 R0669:A03 |
| SEQ ID NO: 713 | is the determined cDNA sequence for clone | 63690137 R0669:A06 |
| SEQ ID NO: 714 | is the determined cDNA sequence for clone | 63690139 R0669:A08 |
| SEQ ID NO: 715 | is the determined cDNA sequence for clone | 63690140 R0669:A09 |
| SEQ ID NO: 716 | is the determined cDNA sequence for clone | 63690141 R0669:A10 |
| SEQ ID NO: 717 | is the determined cDNA sequence for clone | 63690142 R0669:A11 |
| SEQ ID NO: 718 | is the determined cDNA sequence for clone | 63690143 R0669:A12 |
| SEQ ID NO: 719 | is the determined cDNA sequence for clone | 63690146 R0669:B03 |
| SEQ ID NO: 720 | is the determined cDNA sequence for clone | 63690147 R0669:B04 |
| SEQ ID NO: 721 | is the determined cDNA sequence for clone | 63690148 R0669:B05 |
| SEQ ID NO: 722 | is the determined cDNA sequence for clone | 63690149 R0669:B06 |
| SEQ ID NO: 723 | is the determined cDNA sequence for clone | 63690150 R0669:B07 |
| SEQ ID NO: 724 | is the determined cDNA sequence for clone | 63690151 R0669:B08 |
| SEQ ID NO: 725 | is the determined cDNA sequence for clone | 63690152 R0669:B09 |
| SEQ ID NO: 726 | is the determined cDNA sequence for clone | 63690153 R0669:B10 |
| SEQ ID NO: 727 | is the determined cDNA sequence for clone | 63690154 R0669:B11 |
| SEQ ID NO: 728 | is the determined cDNA sequence for clone | 63690155 R0669:B12 |
| SEQ ID NO: 729 | is the determined cDNA sequence for clone | 63690156 R0669:C01 |
| SEQ ID NO: 730 | is the determined cDNA sequence for clone | 63690157 R0669:C02 |
| SEQ ID NO: 731 | is the determined cDNA sequence for clone | 63690158 R0669:C03 |
| SEQ ID NO: 732 | is the determined cDNA sequence for clone | 63690159 R0669:C04 |
| SEQ ID NO: 733 | is the determined cDNA sequence for clone | 63690160 R0669:C05 |
| SEQ ID NO: 734 | is the determined cDNA sequence for clone | 63690161 R0669:C06 |
| SEQ ID NO: 735 | is the determined cDNA sequence for clone | 63690162 R0669:C07 |
| SEQ ID NO: 736 | is the determined cDNA sequence for clone | 63690163 R0669:C08 |
| SEQ ID NO: 737 | is the determined cDNA sequence for clone | 63690164 R0669:C09 |
| SEQ ID NO: 738 | is the determined cDNA sequence for clone | 63690165 R0669:C10 |
| SEQ ID NO: 739 | is the determined cDNA sequence for clone | 63690166 R0669:C11 |
| SEQ ID NO: 740 | is the determined cDNA sequence for clone | 63690167 R0669:C12 |
| SEQ ID NO: 741 | is the determined cDNA sequence for clone | 63690168 R0669:D01 |
| SEQ ID NO: 742 | is the determined cDNA sequence for clone | 63690169 R0669:D02 |
| SEQ ID NO: 743 | is the determined cDNA sequence for clone | 63690170 R0669:D03 |
| SEQ ID NO: 744 | is the determined cDNA sequence for clone | 63690171 R0669:D04 |
| SEQ ID NO: 745 | is the determined cDNA sequence for clone | 63690172 R0669:D05 |
| SEQ ID NO: 746 | is the determined cDNA sequence for clone | 63690173 R0669:D06 |
| SEQ ID NO: 747 | is the determined cDNA sequence for clone | 63690174 R0669:D07 |
| SEQ ID NO: 748 | is the determined cDNA sequence for clone | 63690175 R0669:D08 |
| SEQ ID NO: 749 | is the determined cDNA sequence for clone | 63690176 R0669:D09 |
| SEQ ID NO: 750 | is the determined cDNA sequence for clone | 63690177 R0669:D10 |
| SEQ ID NO: 751 | is the determined cDNA sequence for clone | 63690178 R0669:D11 |
| SEQ ID NO: 752 | is the determined cDNA sequence for clone | 63690179 R0669:D12 |
| SEQ ID NO: 753 | is the determined cDNA sequence for clone | 63690180 R0669:E01 |
| SEQ ID NO: 754 | is the determined cDNA sequence for clone | 63690181 R0669:E02 |
| SEQ ID NO: 755 | is the determined cDNA sequence for clone | 63690182 R0669:E03 |
| SEQ ID NO: 756 | is the determined cDNA sequence for clone | 63690183 R0669:E04 |
| SEQ ID NO: 757 | is the determined cDNA sequence for clone | 63690184 R0669:E05 |
| SEQ ID NO: 758 | is the determined cDNA sequence for clone | 63690185 R0669:E06 |
| SEQ ID NO: 759 | is the determined cDNA sequence for clone | 63690186 R0669:E07 |
| SEQ ID NO: 760 | is the determined cDNA sequence for clone | 63690187 R0669:E08 |
| SEQ ID NO: 761 | is the determined cDNA sequence for clone | 63690188 R0669:E09 |
| SEQ ID NO: 762 | is the determined cDNA sequence for clone | 63690189 R0669:E10 |
| SEQ ID NO: 763 | is the determined cDNA sequence for clone | 63690190 R0669:E11 |
| SEQ ID NO: 764 | is the determined cDNA sequence for clone | 63690191 R0669:E12 |
| SEQ ID NO: 765 | is the determined cDNA sequence for clone | 63690192 R0669:F01 |
| SEQ ID NO: 766 | is the determined cDNA sequence for clone | 63690193 R0669:F02 |
| SEQ ID NO: 767 | is the determined cDNA sequence for clone | 63690194 R0669:F03 |
| SEQ ID NO: 768 | is the determined cDNA sequence for clone | 63690195 R0669:F04 |
| SEQ ID NO: 769 | is the determined cDNA sequence for clone | 63690196 R0669:F05 |
| SEQ ID NO: 770 | is the determined cDNA sequence for clone | 63690197 R0669:F06 |
| SEQ ID NO: 771 | is the determined cDNA sequence for clone | 63690198 R0669:F07 |
| SEQ ID NO: 772 | is the determined cDNA sequence for clone | 63690199 R0669:F08 |
| SEQ ID NO: 773 | is the determined cDNA sequence for clone | 63690200 R0669:F09 |
| SEQ ID NO: 774 | is the determined cDNA sequence for clone | 63690201 R0669:F10 |
| SEQ ID NO: 775 | is the determined cDNA sequence for clone | 63690202 R0669:F11 |
| SEQ ID NO: 776 | is the determined cDNA sequence for clone | 63690203 R0669:F12 |
| SEQ ID NO: 777 | is the determined cDNA sequence for clone | 63690204 R0669:G01 |
| SEQ ID NO: 778 | is the determined cDNA sequence for clone | 63690205 R0669:G02 |
| SEQ ID NO: 779 | is the determined cDNA sequence for clone | 63690206 R0669:G03 |
| SEQ ID NO: 780 | is the determined cDNA sequence for clone | 63690208 R0669:G05 |
| SEQ ID NO: 781 | is the determined cDNA sequence for clone | 63690210 R0669:G07 |
| SEQ ID NO: 782 | is the determined cDNA sequence for clone | 63690211 R0669:G08 |
| SEQ ID NO: 783 | is the determined cDNA sequence for clone | 63690212 R0669:G09 |
| SEQ ID NO: 784 | is the determined cDNA sequence for clone | 63690213 R0669:G10 |
| SEQ ID NO: 785 | is the determined cDNA sequence for clone | 63690214 R0669:G11 |
| SEQ ID NO: 786 | is the determined cDNA sequence for clone | 63690215 R0669:G12 |
| SEQ ID NO: 787 | is the determined cDNA sequence for clone | 63690216 R0669:H01 |
| SEQ ID NO: 788 | is the determined cDNA sequence for clone | 63690217 R0669:H02 |
| SEQ ID NO: 789 | is the determined cDNA sequence for clone | 63690218 R0669:H03 |
| SEQ ID NO: 790 | is the determined cDNA sequence for clone | 63690219 R0669:H04 |
| SEQ ID NO: 791 | is the determined cDNA sequence for clone | 63690220 R0669:H05 |
| SEQ ID NO: 792 | is the determined cDNA sequence for clone | 63690222 R0669:H07 |
| SEQ ID NO: 793 | is the determined cDNA sequence for clone | 63690223 R0669:H08 |
| SEQ ID NO: 794 | is the determined cDNA sequence for clone | 63690224 R0669:H09 |
| SEQ ID NO: 795 | is the determined cDNA sequence for clone | 63690225 R0669:H10 |
| SEQ ID NO: 796 | is the determined cDNA sequence for clone | 63690226 R0669:H11 |
| SEQ ID NO: 797 | is the determined cDNA sequence for clone | 63695095 R0670:A02 |
| SEQ ID NO: 798 | is the determined cDNA sequence for clone | 63695097 R0670:A05 |
| SEQ ID NO: 799 | is the determined cDNA sequence for clone | 63695098 R0670:A06 |
| SEQ ID NO: 800 | is the determined cDNA sequence for clone | 63695099 R0670:A07 |
| SEQ ID NO: 801 | is the determined cDNA sequence for clone | 63695100 R0670:A08 |
| SEQ ID NO: 802 | is the determined cDNA sequence for clone | 63695101 R0670:A09 |
| SEQ ID NO: 803 | is the determined cDNA sequence for clone | 63695102 R0670:A10 |
| SEQ ID NO: 804 | is the determined cDNA sequence for clone | 63695103 R0670:A11 |
| SEQ ID NO: 805 | is the determined cDNA sequence for clone | 63695105 R0670:B01 |
| SEQ ID NO: 806 | is the determined cDNA sequence for clone | 63695107 R0670:B03 |
| SEQ ID NO: 807 | is the determined cDNA sequence for clone | 63695108 R0670:B04 |
| SEQ ID NO: 808 | is the determined cDNA sequence for clone | 63695109 R0670:B05 |
| SEQ ID NO: 809 | is the determined cDNA sequence for clone | 63695110 R0670:B06 |
| SEQ ID NO: 810 | is the determined cDNA sequence for clone | 63695111 R0670:B07 |
| SEQ ID NO: 811 | is the determined cDNA sequence for clone | 63695112 R0670:B08 |
| SEQ ID NO: 812 | is the determined cDNA sequence for clone | 63695113 R0670:B09 |
| SEQ ID NO: 813 | is the determined cDNA sequence for clone | 63695115 R0670:B11 |
| SEQ ID NO: 814 | is the determined cDNA sequence for clone | 63695116 R0670:B12 |
| SEQ ID NO: 815 | is the determined cDNA sequence for clone | 63695117 R0670:C01 |
| SEQ ID NO: 816 | is the determined cDNA sequence for clone | 63695118 R0670:C02 |
| SEQ ID NO: 817 | is the determined cDNA sequence for clone | 63695119 R0670:C03 |
| SEQ ID NO: 818 | is the determined cDNA sequence for clone | 63695120 R0670:C04 |
| SEQ ID NO: 819 | is the determined cDNA sequence for clone | 63695121 R0670:C05 |
| SEQ ID NO: 820 | is the determined cDNA sequence for clone | 63695122 R0670:C06 |
| SEQ ID NO: 821 | is the determined cDNA sequence for clone | 63695123 R0670:C07 |
| SEQ ID NO: 822 | is the determined cDNA sequence for clone | 63695124 R0670:C08 |
| SEQ ID NO: 823 | is the determined cDNA sequence for clone | 63695125 R0670:C09 |
| SEQ ID NO: 824 | is the determined cDNA sequence for clone | 63695126 R0670:C10 |
| SEQ ID NO: 825 | is the determined cDNA sequence for clone | 63695127 R0670:C11 |
| SEQ ID NO: 826 | is the determined cDNA sequence for clone | 63695128 R0670:C12 |
| SEQ ID NO: 827 | is the determined cDNA sequence for clone | 63695129 R0670:D01 |
| SEQ ID NO: 828 | is the determined cDNA sequence for clone | 63695130 R0670:D02 |
| SEQ ID NO: 829 | is the determined cDNA sequence for clone | 63695131 R0670:D03 |
| SEQ ID NO: 830 | is the determined cDNA sequence for clone | 63695132 R0670:D04 |
| SEQ ID NO: 831 | is the determined cDNA sequence for clone | 63695133 R0670:D05 |
| SEQ ID NO: 832 | is the determined cDNA sequence for clone | 63695134 R0670:D06 |
| SEQ ID NO: 833 | is the determined cDNA sequence for clone | 63695135 R0670:D07 |
| SEQ ID NO: 834 | is the determined cDNA sequence for clone | 63695136 R0670:D08 |
| SEQ ID NO: 835 | is the determined cDNA sequence for clone | 63695137 R0670:D09 |
| SEQ ID NO: 836 | is the determined cDNA sequence for clone | 63695138 R0670:D10 |
| SEQ ID NO: 837 | is the determined cDNA sequence for clone | 63695139 R0670:D11 |
| SEQ ID NO: 838 | is the determined cDNA sequence for clone | 63695140 R0670:D12 |
| SEQ ID NO: 839 | is the determined cDNA sequence for clone | 63695142 R0670:E02 |
| SEQ ID NO: 840 | is the determined cDNA sequence for clone | 63695143 R0670:E03 |
| SEQ ID NO: 841 | is the determined cDNA sequence for clone | 63695144 R0670:E04 |
| SEQ ID NO: 842 | is the determined cDNA sequence for clone | 63695145 R0670:E05 |
| SEQ ID NO: 843 | is the determined cDNA sequence for clone | 63695147 R0670:E07 |
| SEQ ID NO: 844 | is the determined cDNA sequence for clone | 63695148 R0670:E08 |
| SEQ ID NO: 845 | is the determined cDNA sequence for clone | 63695149 R0670:E09 |
| SEQ ID NO: 846 | is the determined cDNA sequence for clone | 63695150 R0670:E10 |
| SEQ ID NO: 847 | is the determined cDNA sequence for clone | 63695151 R0670:E11 |
| SEQ ID NO: 848 | is the determined cDNA sequence for clone | 63695152 R0670:E12 |
| SEQ ID NO: 849 | is the determined cDNA sequence for clone | 63695153 R0670:F01 |
| SEQ ID NO: 850 | is the determined cDNA sequence for clone | 63695154 R0670:F02 |
| SEQ ID NO: 851 | is the determined cDNA sequence for clone | 63695155 R0670:F03 |
| SEQ ID NO: 852 | is the determined cDNA sequence for clone | 63695156 R0670:F04 |
| SEQ ID NO: 853 | is the determined cDNA sequence for clone | 63695157 R0670:F05 |
| SEQ ID NO: 854 | is the determined cDNA sequence for clone | 63695158 R0670:F06 |
| SEQ ID NO: 855 | is the determined cDNA sequence for clone | 63695159 R0670:F07 |
| SEQ ID NO: 856 | is the determined cDNA sequence for clone | 63695160 R0670:F08 |
| SEQ ID NO: 857 | is the determined cDNA sequence for clone | 63695161 R0670:F09 |
| SEQ ID NO: 858 | is the determined cDNA sequence for clone | 63695162 R0670:F10 |
| SEQ ID NO: 859 | is the determined cDNA sequence for clone | 63695163 R0670:F11 |
| SEQ ID NO: 860 | is the determined cDNA sequence for clone | 63695164 R0670:F12 |
| SEQ ID NO: 861 | is the determined cDNA sequence for clone | 63695165 R0670:G01 |
| SEQ ID NO: 862 | is the determined cDNA sequence for clone | 63695166 R0670:G02 |
| SEQ ID NO: 863 | is the determined cDNA sequence for clone | 63695167 R0670:G03 |
| SEQ ID NO: 864 | is the determined cDNA sequence for clone | 63695168 R0670:G04 |
| SEQ ID NO: 865 | is the determined cDNA sequence for clone | 63695169 R0670:G05 |
| SEQ ID NO: 866 | is the determined cDNA sequence for clone | 63695170 R0670:G06 |
| SEQ ID NO: 867 | is the determined cDNA sequence for clone | 63695171 R0670:G07 |
| SEQ ID NO: 868 | is the determined cDNA sequence for clone | 63695172 R0670:G08 |
| SEQ ID NO: 869 | is the determined cDNA sequence for clone | 63695173 R0670:G09 |
| SEQ ID NO: 870 | is the determined cDNA sequence for clone | 63695174 R0670:G10 |
| SEQ ID NO: 871 | is the determined cDNA sequence for clone | 63695175 R0670:G11 |
| SEQ ID NO: 872 | is the determined cDNA sequence for clone | 63695176 R0670:G12 |
| SEQ ID NO: 873 | is the determined cDNA sequence for clone | 63695177 R0670:H01 |
| SEQ ID NO: 874 | is the determined cDNA sequence for clone | 63695178 R0670:H02 |
| SEQ ID NO: 875 | is the determined cDNA sequence for clone | 63695179 R0670:H03 |
| SEQ ID NO: 876 | is the determined cDNA sequence for clone | 63695180 R0670:H04 |
| SEQ ID NO: 877 | is the determined cDNA sequence for clone | 63695181 R0670:H05 |
| SEQ ID NO: 878 | is the determined cDNA sequence for clone | 63695182 R0670:H06 |
| SEQ ID NO: 879 | is the determined cDNA sequence for clone | 63695183 R0670:H07 |
| SEQ ID NO: 880 | is the determined cDNA sequence for clone | 63695184 R0670:H08 |
| SEQ ID NO: 881 | is the determined cDNA sequence for clone | 63695185 R0670:H09 |
| SEQ ID NO: 882 | is the determined cDNA sequence for clone | 63695186 R0670:H10 |
| SEQ ID NO: 883 | is the determined cDNA sequence for clone | 63695187 R0670:H11 |
| SEQ ID NO: 884 | is the determined cDNA sequence for clone | 63695653 R0671:A02 |
| SEQ ID NO: 885 | is the determined cDNA sequence for clone | 63695654 R0671:A03 |
| SEQ ID NO: 886 | is the determined cDNA sequence for clone | 63695655 R0671:A05 |
| SEQ ID NO: 887 | is the determined cDNA sequence for clone | 63695657 R0671:A07 |
| SEQ ID NO: 888 | is the determined cDNA sequence for clone | 63695659 R0671:A09 |
| SEQ ID NO: 889 | is the determined cDNA sequence for clone | 63695660 R0671:A10 |
| SEQ ID NO: 890 | is the determined cDNA sequence for clone | 63695661 R0671:A11 |
| SEQ ID NO: 891 | is the determined cDNA sequence for clone | 63695663 R0671:B01 |
| SEQ ID NO: 892 | is the determined cDNA sequence for clone | 63695664 R0671:B02 |
| SEQ ID NO: 893 | is the determined cDNA sequence for clone | 63695665 R0671:B03 |
| SEQ ID NO: 894 | is the determined cDNA sequence for clone | 63695666 R0671:B04 |
| SEQ ID NO: 895 | is the determined cDNA sequence for clone | 63695667 R0671:B05 |
| SEQ ID NO: 896 | is the determined cDNA sequence for clone | 63695668 R0671:B06 |
| SEQ ID NO: 897 | is the determined cDNA sequence for clone | 63695669 R0671:B07 |
| SEQ ID NO: 898 | is the determined cDNA sequence for clone | 63695670 R0671:B08 |
| SEQ ID NO: 899 | is the determined cDNA sequence for clone | 63695671 R0671:B09 |
| SEQ ID NO: 900 | is the determined cDNA sequence for clone | 63695672 R0671:B10 |
| SEQ ID NO: 901 | is the determined cDNA sequence for clone | 63695673 R0671:B11 |
| SEQ ID NO: 902 | is the determined cDNA sequence for clone | 63695675 R0671:C01 |
| SEQ ID NO: 903 | is the determined cDNA sequence for clone | 63695676 R0671:C02 |
| SEQ ID NO: 904 | is the determined cDNA sequence for clone | 63695678 R0671:C04 |
| SEQ ID NO: 905 | is the determined cDNA sequence for clone | 63695679 R0671:C05 |
| SEQ ID NO: 906 | is the determined cDNA sequence for clone | 63695680 R0671:C06 |
| SEQ ID NO: 907 | is the determined cDNA sequence for clone | 63695682 R0671:C08 |
| SEQ ID NO: 908 | is the determined cDNA sequence for clone | 63695683 R0671:C09 |
| SEQ ID NO: 909 | is the determined cDNA sequence for clone | 63695685 R0671:C11 |
| SEQ ID NO: 910 | is the determined cDNA sequence for clone | 63695686 R0671:C12 |
| SEQ ID NO: 911 | is the determined cDNA sequence for clone | 63695687 R0671:D01 |
| SEQ ID NO: 912 | is the determined cDNA sequence for clone | 63695688 R0671:D02 |
| SEQ ID NO: 913 | is the determined cDNA sequence for clone | 63695689 R0671:D03 |
| SEQ ID NO: 914 | is the determined cDNA sequence for clone | 63695690 R0671:D04 |
| SEQ ID NO: 915 | is the determined cDNA sequence for clone | 63695691 R0671:D05 |
| SEQ ID NO: 916 | is the determined cDNA sequence for clone | 63695692 R0671:D06 |
| SEQ ID NO: 917 | is the determined cDNA sequence for clone | 63695693 R0671:D07 |
| SEQ ID NO: 918 | is the determined cDNA sequence for clone | 63695694 R0671:D08 |
| SEQ ID NO: 919 | is the determined cDNA sequence for clone | 63695695 R0671:D09 |
| SEQ ID NO: 920 | is the determined cDNA sequence for clone | 63695696 R0671:D10 |
| SEQ ID NO: 92l | is the determined cDNA sequence for clone | 63695697 R0671:D11 |
| SEQ ID NO: 922 | is the determined cDNA sequence for clone | 63695698 R0671:D12 |
| SEQ ID NO: 923 | is the determined cDNA sequence for clone | 63695699 R0671:E01 |
| SEQ ID NO: 924 | is the determined cDNA sequence for clone | 63695700 R0671:E02 |
| SEQ ID NO: 925 | is the determined cDNA sequence for clone | 63695701 R0671:E03 |
| SEQ ID NO: 926 | is the determined cDNA sequence for clone | 63695702 R0671:E04 |
| SEQ ID NO: 927 | is the determined cDNA sequence for clone | 63695703 R0671:E05 |
| SEQ ID NO: 928 | is the determined cDNA sequence for clone | 63695704 R0671:E06 |
| SEQ ID NO: 929 | is the determined cDNA sequence for clone | 63695705 R0671:E07 |
| SEQ ID NO: 930 | is the determined cDNA sequence for clone | 63695706 R0671:E08 |
| SEQ ID NO: 931 | is the determined cDNA sequence for clone | 63695708 R0671:E10 |
| SEQ ID NO: 932 | is the determined cDNA sequence for clone | 63695710 R0671:E12 |
| SEQ ID NO: 933 | is the determined cDNA sequence for clone | 63695711 R0671:F01 |
| SEQ ID NO: 934 | is the determined cDNA sequence for clone | 63695712 R0671:F02 |
| SEQ ID NO: 935 | is the determined cDNA sequence for clone | 63695713 R0671:F03 |
| SEQ ID NO: 936 | is the determined cDNA sequence for clone | 63695715 R0671:F05 |
| SEQ ID NO: 937 | is the determined cDNA sequence for clone | 63695716 R0671:F06 |
| SEQ ID NO: 938 | is the determined cDNA sequence for clone | 63695717 R0671:F07 |
| SEQ ID NO: 939 | is the determined cDNA sequence for clone | 63695718 R0671:F08 |
| SEQ ID NO: 940 | is the determined cDNA sequence for clone | 63695719 R0671:F09 |
| SEQ ID NO: 941 | is the determined cDNA sequence for clone | 63695720 R0671:F10 |
| SEQ ID NO: 942 | is the determined cDNA sequence for clone | 63695721 R0671:F11 |
| SEQ ID NO: 943 | is the determined cDNA sequence for clone | 63695722 R0671:F12 |
| SEQ ID NO: 944 | is the determined cDNA sequence for clone | 63695723 R0671:G01 |
| SEQ ID NO: 945 | is the determined cDNA sequence for clone | 63695724 R0671:G02 |
| SEQ ID NO: 946 | is the determined cDNA sequence for clone | 63695725 R0671:G03 |
| SEQ ID NO: 947 | is the determined cDNA sequence for clone | 63695727 R0671:G05 |
| SEQ ID NO: 948 | is the determined cDNA sequence for clone | 63695728 R0671:G06 |
| SEQ ID NO: 949 | is the determined cDNA sequence for clone | 63695729 R0671:G07 |
| SEQ ID NO: 950 | is the determined cDNA sequence for clone | 63695730 R0671:G08 |
| SEQ ID NO: 951 | is the determined cDNA sequence for clone | 63695733 R0671:G11 |
| SEQ ID NO: 952 | is the determined cDNA sequence for clone | 63695734 R0671:G12 |
| SEQ ID NO: 953 | is the determined cDNA sequence for clone | 63695735 R0671:H01 |
| SEQ ID NO: 954 | is the determined cDNA sequence for clone | 63695736 R0671:H02 |
| SEQ ID NO: 955 | is the determined cDNA sequence for clone | 63695737 R0671:H03 |
| SEQ ID NO: 956 | is the determined cDNA sequence for clone | 63695738 R0671:H04 |
| SEQ ID NO: 957 | is the determined cDNA sequence for clone | 63695739 R0671:H05 |
| SEQ ID NO: 958 | is the determined cDNA sequence for clone | 63695740 R0671:H06 |
| SEQ ID NO: 959 | is the determined cDNA sequence for clone | 63695741 R0671:H07 |
| SEQ ID NO: 960 | is the determined cDNA sequence for clone | 63695742 R0671:H08 |
| SEQ ID NO: 961 | is the determined cDNA sequence for clone | 63695743 R0671:H09 |
| SEQ ID NO: 962 | is the determined cDNA sequence for clone | 63695744 R0671:H10 |
| SEQ ID NO: 963 | is the determined cDNA sequence for clone | 63695745 R0671:H11 |
| SEQ ID NO: 964 | is the determined cDNA sequence for clone | 63695002 R0672:A02 |
| SEQ ID NO: 965 | is the determined cDNA sequence for clone | 63695003 R0672:A03 |
| SEQ ID NO: 966 | is the determined cDNA sequence for clone | 63695004 R0672:A05 |
| SEQ ID NO: 967 | is the determined cDNA sequence for clone | 63695005 R0672:A06 |
| SEQ ID NO: 968 | is the determined cDNA sequence for clone | 63695007 R0672:A08 |
| SEQ ID NO: 969 | is the determined cDNA sequence for clone | 63695008 R0672:A09 |
| SEQ ID NO: 970 | is the determined cDNA sequence for clone | 63695009 R0672:A10 |
| SEQ ID NO: 971 | is the determined cDNA sequence for clone | 63695010 R0672:A11 |
| SEQ ID NO: 972 | is the determined cDNA sequence for clone | 63695011 R0672:A12 |
| SEQ ID NO: 973 | is the determined cDNA sequence for clone | 63695012 R0672:B01 |
| SEQ ID NO: 974 | is the determined cDNA sequence for clone | 63695013 R0672:B02 |
| SEQ ID NO: 975 | is the determined cDNA sequence for clone | 63695015 R0672:B04 |
| SEQ ID NO: 976 | is the determined cDNA sequence for clone | 63695016 R0672:B05 |
| SEQ ID NO: 977 | is the determined cDNA sequence for clone | 63695017 R0672:B06 |
| SEQ ID NO: 978 | is the determined cDNA sequence for clone | 63695018 R0672:B07 |
| SEQ ID NO: 979 | is the determined cDNA sequence for clone | 63695019 R0672:B08 |
| SEQ ID NO: 980 | is the determined cDNA sequence for clone | 63695020 R0672:B09 |
| SEQ ID NO: 981 | is the determined cDNA sequence for clone | 63695021 R0672:B10 |
| SEQ ID NO: 982 | is the determined cDNA sequence for clone | 63695022 R0672:B11 |
| SEQ ID NO: 983 | is the determined cDNA sequence for clone | 63695023 R0672:B12 |
| SEQ ID NO: 984 | is the determined cDNA sequence for clone | 63695024 R0672:C01 |
| SEQ ID NO: 985 | is the determined cDNA sequence for clone | 63695025 R0672:C02 |
| SEQ ID NO: 986 | is the determined cDNA sequence for clone | 63695026 R0672:C03 |
| SEQ ID NO: 987 | is the determined cDNA sequence for clone | 63695027 R0672:C04 |
| SEQ ID NO: 988 | is the determined cDNA sequence for clone | 63695028 R0672:C05 |
| SEQ ID NO: 989 | is the determined cDNA sequence for clone | 63695029 R0672:C06 |
| SEQ ID NO: 990 | is the determined cDNA sequence for clone | 63695030 R0672:C07 |
| SEQ ID NO: 991 | is the determined cDNA sequence for clone | 63695031 R0672:C08 |
| SEQ ID NO: 992 | is the determined cDNA sequence for clone | 63695032 R0672:C09 |
| SEQ ID NO: 993 | is the determined cDNA sequence for clone | 63695033 R0672:C10 |
| SEQ ID NO: 994 | is the determined cDNA sequence for clone | 63695034 R0672:C11 |
| SEQ ID NO: 995 | is the determined cDNA sequence for clone | 63695035 R0672:C12 |
| SEQ ID NO: 996 | is the determined cDNA sequence for clone | 63695036 R0672:D01 |
| SEQ ID NO: 997 | is the determined cDNA sequence for clone | 63695037 R0672:D02 |
| SEQ ID NO: 998 | is the determined cDNA sequence for clone | 63695038 R0672:D03 |
| SEQ ID NO: 999 | is the determined cDNA sequence for clone | 63695039 R0672:D04 |
| SEQ ID NO: 1000 | is the determined cDNA sequence for clone | 63695040 R0672:D05 |
| SEQ ID NO: 1001 | is the determined cDNA sequence for clone | 63695043 R0672:D08 |
| SEQ ID NO: 1002 | is the determined cDNA sequence for clone | 63695044 R0672:D09 |
| SEQ ID NO: 1003 | is the determined cDNA sequence for clone | 63695045 R0672:D10 |
| SEQ ID NO: 1004 | is the determined cDNA sequence for clone | 63695046 R0672:D11 |
| SEQ ID NO: 1005 | is the determined cDNA sequence for clone | 63695047 R0672:D12 |
| SEQ ID NO: 1006 | is the determined cDNA sequence for clone | 63695048 R0672:E01 |
| SEQ ID NO: 1007 | is the determined cDNA sequence for clone | 63695049 R0672:E02 |
| SEQ ID NO: 1008 | is the determined cDNA sequence for clone | 63695050 R0672:E03 |
| SEQ ID NO: 1009 | is the determined cDNA sequence for clone | 63695051 R0672:E04 |
| SEQ ID NO: 1010 | is the determined cDNA sequence for clone | 63695052 R0672:E05 |
| SEQ ID NO: 1011 | is the determined cDNA sequence for clone | 63695053 R0672:E06 |
| SEQ ID NO: 1012 | is the determined cDNA sequence for clone | 63695054 R0672:E07 |
| SEQ ID NO: 1013 | is the determined cDNA sequence for clone | 63695055 R0672:E08 |
| SEQ ID NO: 1014 | is the determined cDNA sequence for clone | 63695056 R0672:E09 |
| SEQ ID NO: 1015 | is the determined cDNA sequence for clone | 63695057 R0672:E10 |
| SEQ ID NO: 1016 | is the determined cDNA sequence for clone | 63695058 R0672:E11 |
| SEQ ID NO: 1017 | is the determined cDNA sequence for clone | 63695059 R0672:E12 |
| SEQ ID NO: 1018 | is the determined cDNA sequence for clone | 63695060 R0672:F01 |
| SEQ ID NO: 1019 | is the determined cDNA sequence for clone | 63695061 R0672:F02 |
| SEQ ID NO: 1020 | is the determined cDNA sequence for clone | 63695062 R0672:F03 |
| SEQ ID NO: 1021 | is the determined cDNA sequence for clone | 63695063 R0672:F04 |
| SEQ ID NO: 1022 | is the determined cDNA sequence for clone | 63695064 R0672:F05 |
| SEQ ID NO: 1023 | is the determined cDNA sequence for clone | 63695065 R0672:F06 |
| SEQ ID NO: 1024 | is the determined cDNA sequence for clone | 63695066 R0672:F07 |
| SEQ ID NO: 1025 | is the determined cDNA sequence for clone | 63695068 R0672:F09 |
| SEQ ID NO: 1026 | is the determined cDNA sequence for clone | 63695069 R0672:F10 |
| SEQ ID NO: 1027 | is the determined cDNA sequence for clone | 63695070 R0672:F11 |
| SEQ ID NO: 1028 | is the determined cDNA sequence for clone | 63695071 R0672:F12 |
| SEQ ID NO: 1029 | is the determined cDNA sequence for clone | 63695072 R0672:G01 |
| SEQ ID NO: 1030 | is the determined cDNA sequence for clone | 63695073 R0672:G02 |
| SEQ ID NO: 1031 | is the determined cDNA sequence for clone | 63695074 R0672:G03 |
| SEQ ID NO: 1032 | is the determined cDNA sequence for clone | 63695075 R0672:G04 |
| SEQ ID NO: 1033 | is the determined cDNA sequence for clone | 63695076 R0672:G05 |
| SEQ ID NO: 1034 | is the determined cDNA sequence for clone | 63695077 R0672:G06 |
| SEQ ID NO: 1035 | is the determined cDNA sequence for clone | 63695078 R0672:G07 |
| SEQ ID NO: 1036 | is the determined cDNA sequence for clone | 63695079 R0672:G08 |
| SEQ ID NO: 1037 | is the determined cDNA sequence for clone | 63695080 R0672:G09 |
| SEQ ID NO: 1038 | is the determined cDNA sequence for clone | 63695081 R0672:G10 |
| SEQ ID NO: 1039 | is the determined cDNA sequence for clone | 63695082 R0672:G11 |
| SEQ ID NO: 1040 | is the determined cDNA sequence for clone | 63695083 R0672:G12 |
| SEQ ID NO: 1041 | is the determined cDNA sequence for clone | 63695085 R0672:H02 |
| SEQ ID NO: 1042 | is the determined cDNA sequence for clone | 63695086 R0672:H03 |
| SEQ ID NO: 1043 | is the determined cDNA sequence for clone | 63695087 R0672:H04 |
| SEQ ID NO: 1044 | is the determined cDNA sequence for clone | 63695088 R0672:H05 |
| SEQ ID NO: 1045 | is the determined cDNA sequence for clone | 63695089 R0672:H06 |
| SEQ ID NO: 1046 | is the determined cDNA sequence for clone | 63695090 R0672:H07 |
| SEQ ID NO: 1047 | is the determined cDNA sequence for clone | 63695091 R0672:H08 |
| SEQ ID NO: 1048 | is the determined cDNA sequence for clone | 63695092 R0672:H09 |
| SEQ ID NO: 1049 | is the determined cDNA sequence for clone | 63695093 R0672:H10 |
| SEQ ID NO: 1050 | is the determined cDNA sequence for clone | 63695094 R0672:H11 |
| SEQ ID NO: 1051 | is the determined cDNA sequence for clone | 63695282 R0673:A03 |
| SEQ ID NO: 1052 | is the determined cDNA sequence for clone | 63695284 R0673:A06 |
| SEQ ID NO: 1053 | is the determined cDNA sequence for clone | 63695285 R0673:A07 |
| SEQ ID NO: 1054 | is the determined cDNA sequence for clone | 63695286 R0673:A08 |
| SEQ ID NO: 1055 | is the determined cDNA sequence for clone | 63695287 R0673:A09 |
| SEQ ID NO: 1056 | is the determined cDNA sequence for clone | 63695289 R0673:A11 |
| SEQ ID NO: 1057 | is the determined cDNA sequence for clone | 63695290 R0673:A12 |
| SEQ ID NO: 1058 | is the determined cDNA sequence for clone | 63695291 R0673:B01 |
| SEQ ID NO: 1059 | is the determined cDNA sequence for clone | 63695292 R0673:B02 |
| SEQ ID NO: 1060 | is the determined cDNA sequence for clone | 63695294 R0673:B04 |
| SEQ ID NO: 1061 | is the determined cDNA sequence for clone | 63695295 R0673:B05 |
| SEQ ID NO: 1062 | is the determined cDNA sequence for clone | 63695296 R0673:B06 |
| SEQ ID NO: 1063 | is the determined cDNA sequence for clone | 63695297 R0673:B07 |
| SEQ ID NO: 1064 | is the determined cDNA sequence for clone | 63695298 R0673:B08 |
| SEQ ID NO: 1065 | is the determined cDNA sequence for clone | 63695301 R0673:B11 |
| SEQ ID NO: 1066 | is the determined cDNA sequence for clone | 63695303 R0673:C01 |
| SEQ ID NO: 1067 | is the determined cDNA sequence for clone | 63695304 R0673:C02 |
| SEQ ID NO: 1068 | is the determined cDNA sequence for clone | 63695305 R0673:C03 |
| SEQ ID NO: 1069 | is the determined cDNA sequence for clone | 63695306 R0673:C04 |
| SEQ ID NO: 1070 | is the determined cDNA sequence for clone | 63695307 R0673:C05 |
| SEQ ID NO: 1071 | is the determined cDNA sequence for clone | 63695308 R0673:C06 |
| SEQ ID NO: 1072 | is the determined cDNA sequence for clone | 63695310 R0673:C08 |
| SEQ ID NO: 1073 | is the determined cDNA sequence for clone | 63695311 R0673:C09 |
| SEQ ID NO: 1074 | is the determined cDNA sequence for clone | 63695312 R0673:C10 |
| SEQ ID NO: 1075 | is the determined cDNA sequence for clone | 63695313 R0673:C11 |
| SEQ ID NO: 1076 | is the determined cDNA sequence for clone | 63695314 R0673:C12 |
| SEQ ID NO: 1077 | is the determined cDNA sequence for clone | 63695315 R0673:D01 |
| SEQ ID NO: 1078 | is the determined cDNA sequence for clone | 63695316 R0673:D02 |
| SEQ ID NO: 1079 | is the determined cDNA sequence for clone | 63695317 R0673:D03 |
| SEQ ID NO: 1080 | is the determined cDNA sequence for clone | 63695318 R0673:D04 |
| SEQ ID NO: 1081 | is the determined cDNA sequence for clone | 63695319 R0673:D05 |
| SEQ ID NO: 1082 | is the determined cDNA sequence for clone | 63695320 R0673:D06 |
| SEQ ID NO: 1083 | is the determined cDNA sequence for clone | 63695321 R0673:D07 |
| SEQ ID NO: 1084 | is the determined cDNA sequence for clone | 63695323 R0673:D09 |
| SEQ ID NO: 1085 | is the determined cDNA sequence for clone | 63695324 R0673:D10 |
| SEQ ID NO: 1086 | is the determined cDNA sequence for clone | 63695325 R0673:D11 |
| SEQ ID NO: 1087 | is the determined cDNA sequence for clone | 63695326 R0673:D12 |
| SEQ ID NO: 1088 | is the determined cDNA sequence for clone | 63695327 R0673:E01 |
| SEQ ID NO: 1089 | is the determined cDNA sequence for clone | 63695328 R0673:E02 |
| SEQ ID NO: 1090 | is the determined cDNA sequence for clone | 63695329 R0673:E03 |
| SEQ ID NO: 1091 | is the determined cDNA sequence for clone | 63695330 R0673:E04 |
| SEQ ID NO: 1092 | is the determined cDNA sequence for clone | 63695331 R0673:E05 |
| SEQ ID NO: 1093 | is the determined cDNA sequence for clone | 63695333 R0673:E07 |
| SEQ ID NO: 1094 | is the determined cDNA sequence for clone | 63695334 R0673:E08 |
| SEQ ID NO: 1095 | is the determined cDNA sequence for clone | 63695335 R0673:E09 |
| SEQ ID NO: 1096 | is the determined cDNA sequence for clone | 63695337 R0673:E11 |
| SEQ ID NO: 1097 | is the determined cDNA sequence for clone | 63695338 R0673:E12 |
| SEQ ID NO: 1098 | is the determined cDNA sequence for clone | 63695339 R0673:F01 |
| SEQ ID NO: 1099 | is the determined cDNA sequence for clone | 63695341 R0673:F03 |
| SEQ ID NO: 1100 | is the determined cDNA sequence for clone | 63695342 R0673:F04 |
| SEQ ID NO: 1101 | is the determined cDNA sequence for clone | 63695344 R0673:F06 |
| SEQ ID NO: 1102 | is the determined cDNA sequence for clone | 63695346 R0673:F08 |
| SEQ ID NO: 1103 | is the determined cDNA sequence for clone | 63695347 R0673:F09 |
| SEQ ID NO: 1104 | is the determined cDNA sequence for clone | 63695348 R0673:F10 |
| SEQ ID NO: 1105 | is the determined cDNA sequence for clone | 63695349 R0673:F11 |
| SEQ ID NO: 1106 | is the determined cDNA sequence for clone | 63695350 R0673:F12 |
| SEQ ID NO: 1107 | is the determined cDNA sequence for clone | 63695351 R0673:G01 |
| SEQ ID NO: 1108 | is the determined cDNA sequence for clone | 63695352 R0673:G02 |
| SEQ ID NO: 1109 | is the determined cDNA sequence for clone | 63695353 R0673:G03 |
| SEQ ID NO: 1110 | is the determined cDNA sequence for clone | 63695354 R0673:G04 |
| SEQ ID NO: 1111 | is the determined cDNA sequence for clone | 63695356 R0673:G06 |
| SEQ ID NO: 1112 | is the determined cDNA sequence for clone | 63695357 R0673:G07 |
| SEQ ID NO: 1113 | is the determined cDNA sequence for clone | 63695358 R0673:G08 |
| SEQ ID NO: 1114 | is the determined cDNA sequence for clone | 63695359 R0673:G09 |
| SEQ ID NO: 1115 | is the determined cDNA sequence for clone | 63695361 R0673:G11 |
| SEQ ID NO: 1116 | is the determined cDNA sequence for clone | 63695363 R0673:H01 |
| SEQ ID NO: 1117 | is the determined cDNA sequence for clone | 63695364 R0673:H02 |
| SEQ ID NO: 1118 | is the determined cDNA sequence for clone | 63695366 R0673:H04 |
| SEQ ID NO: 1119 | is the determined cDNA sequence for clone | 63695367 R0673:H05 |
| SEQ ID NO: 1120 | is the determined cDNA sequence for clone | 63695368 R0673:H06 |
| SEQ ID NO: 1121 | is the determined cDNA sequence for clone | 63695369 R0673:H07 |
| SEQ ID NO: 1122 | is the determined cDNA sequence for clone | 63695370 R0673:H08 |
| SEQ ID NO: 1123 | is the determined cDNA sequence for clone | 63695371 R0673:H09 |
| SEQ ID NO: 1124 | is the determined cDNA sequence for clone | 63695372 R0673:H10 |
| SEQ ID NO: 1125 | is the determined cDNA sequence for clone | 63695373 R0673:H11 |
| SEQ ID NO: 1126 | is the determined cDNA sequence for clone | 63695188 R0674:A02 |
| SEQ ID NO: 1127 | is the determined cDNA sequence for clone | 63695189 R0674:A03 |
| SEQ ID NO: 1128 | is the determined cDNA sequence for clone | 63695190 R0674:A05 |
| SEQ ID NO: 1129 | is the determined cDNA sequence for clone | 63695191 R0674:A06 |
| SEQ ID NO: 1130 | is the determined cDNA sequence for clone | 63695192 R0674:A07 |
| SEQ ID NO: 1131 | is the determined cDNA sequence for clone | 63695194 R0674:A09 |
| SEQ ID NO: 1132 | is the determined cDNA sequence for clone | 63695196 R0674:A11 |
| SEQ ID NO: 1133 | is the determined cDNA sequence for clone | 63695197 R0674:A12 |
| SEQ ID NO: 1134 | is the determined cDNA sequence for clone | 63695198 R0674:B01 |
| SEQ ID NO: 1135 | is the determined cDNA sequence for clone | 63695199 R0674:B02 |
| SEQ ID NO: 1136 | is the determined cDNA sequence for clone | 63695200 R0674:B03 |
| SEQ ID NO: 1137 | is the determined cDNA sequence for clone | 63695202 R0674:B05 |
| SEQ ID NO: 1138 | is the determined cDNA sequence for clone | 63695203 R0674:B06 |
| SEQ ID NO: 1139 | is the determined cDNA sequence for clone | 63695205 R0674:B08 |
| SEQ ID NO: 1140 | is the determined cDNA sequence for clone | 63695206 R0674:B09 |
| SEQ ID NO: 1141 | is the determined cDNA sequence for clone | 63695207 R0674:B10 |
| SEQ ID NO: 1142 | is the determined cDNA sequence for clone | 63695208 R0674:B11 |
| SEQ ID NO: 1143 | is the determined cDNA sequence for clone | 63695209 R0674:B12 |
| SEQ ID NO: 1144 | is the determined cDNA sequence for clone | 63695210 R0674:C01 |
| SEQ ID NO: 1145 | is the determined cDNA sequence for clone | 63695212 R0674:C03 |
| SEQ ID NO: 1146 | is the determined cDNA sequence for clone | 63695213 R0674:C04 |
| SEQ ID NO: 1147 | is the determined cDNA sequence for clone | 63695214 R0674:C05 |
| SEQ ID NO: 1148 | is the determined cDNA sequence for clone | 63695216 R0674:C07 |
| SEQ ID NO: 1149 | is the determined cDNA sequence for clone | 63695218 R0674:C09 |
| SEQ ID NO: 1150 | is the determined cDNA sequence for clone | 63695220 R0674:C11 |
| SEQ ID NO: 1151 | is the determined cDNA sequence for clone | 63695221 R0674:C12 |
| SEQ ID NO: 1152 | is the determined cDNA sequence for clone | 63695223 R0674:D02 |
| SEQ ID NO: 1153 | is the determined cDNA sequence for clone | 63695224 R0674:D03 |
| SEQ ID NO: 1154 | is the determined cDNA sequence for clone | 63695225 R0674:D04 |
| SEQ ID NO: 1155 | is the determined cDNA sequence for clone | 63695226 R0674:D05 |
| SEQ ID NO: 1156 | is the determined cDNA sequence for clone | 63695227 R0674:D06 |
| SEQ ID NO: 1157 | is the determined cDNA sequence for clone | 63695228 R0674:D07 |
| SEQ ID NO: 1158 | is the determined cDNA sequence for clone | 63695234 R0674:E01 |
| SEQ ID NO: 1159 | is the determined cDNA sequence for clone | 63695236 R0674:E03 |
| SEQ ID NO: 1160 | is the determined cDNA sequence for clone | 63695237 R0674:E04 |
| SEQ ID NO: 1161 | is the determined cDNA sequence for clone | 63695238 R0674:E05 |
| SEQ ID NO: 1162 | is the determined cDNA sequence for clone | 63695241 R0674:E08 |
| SEQ ID NO: 1163 | is the determined cDNA sequence for clone | 63695244 R0674:E11 |
| SEQ ID NO: 1164 | is the determined cDNA sequence for clone | 63695247 R0674:F02 |
| SEQ ID NO: 1165 | is the determined cDNA sequence for clone | 63695248 R0674:F03 |
| SEQ ID NO: 1166 | is the determined cDNA sequence for clone | 63695249 R0674:F04 |
| SEQ ID NO: 1167 | is the determined cDNA sequence for clone | 63695250 R0674:F05 |
| SEQ ID NO: 1168 | is the determined cDNA sequence for clone | 63695251 R0674:F06 |
| SEQ ID NO: 1169 | is the determined cDNA sequence for clone | 63695252 R0674:F07 |
| SEQ ID NO: 1170 | is the determined cDNA sequence for clone | 63695255 R0674:F10 |
| SEQ ID NO: 1171 | is the determined cDNA sequence for clone | 63695256 R0674:F11 |
| SEQ ID NO: 1172 | is the determined cDNA sequence for clone | 63695257 R0674:F12 |
| SEQ ID NO: 1173 | is the determined cDNA sequence for clone | 63695261 R0674:G04 |
| SEQ ID NO: 1174 | is the determined cDNA sequence for clone | 63695262 R0674:G05 |
| SEQ ID NO: 1175 | is the determined cDNA sequence for clone | 63695263 R0674:G06 |
| SEQ ID NO: 1176 | is the determined cDNA sequence for clone | 63695264 R0674:G07 |
| SEQ ID NO: 1177 | is the determined cDNA sequence for clone | 63695265 R0674:G08 |
| SEQ ID NO: 1178 | is the determined cDNA sequence for clone | 63695266 R0674:G09 |
| SEQ ID NO: 1179 | is the determined cDNA sequence for clone | 63695267 R0674:G10 |
| SEQ ID NO: 1180 | is the determined cDNA sequence for clone | 63695268 R0674:G11 |
| SEQ ID NO: 1181 | is the determined cDNA sequence for clone | 63695270 R0674:H01 |
| SEQ ID NO: 1182 | is the determined cDNA sequence for clone | 63695271 R0674:H02 |
| SEQ ID NO: 1183 | is the determined cDNA sequence for clone | 63695272 R0674:H03 |
| SEQ ID NO: 1184 | is the determined cDNA sequence for clone | 63695273 R0674:H04 |
| SEQ ID NO: 1185 | is the determined cDNA sequence for clone | 63695274 R0674:H05 |
| SEQ ID NO: 1186 | is the determined cDNA sequence for clone | 63695275 R0674:H06 |
| SEQ ID NO: 1187 | is the determined cDNA sequence for clone | 63695276 R0674:H07 |
| SEQ ID NO: 1188 | is the determined cDNA sequence for clone | 63695278 R0674:H09 |
| SEQ ID NO: 1189 | is the determined cDNA sequence for clone | 63695279 R0674:H10 |
| SEQ ID NO: 1190 | is the determined cDNA sequence for clone | 63695280 R0674:H11 |
| SEQ ID NO: 1191 | is the determined cDNA sequence for clone | 63694910 R0675:A03 |
| SEQ ID NO: 1192 | is the determined cDNA sequence for clone | 63694911 R0675:A05 |
| SEQ ID NO: 1193 | is the determined cDNA sequence for clone | 63694912 R0675:A06 |
| SEQ ID NO: 1194 | is the determined cDNA sequence for clone | 63694913 R0675:A07 |
| SEQ ID NO: 1195 | is the determined cDNA sequence for clone | 63694914 R0675:A08 |
| SEQ ID NO: 1196 | is the determined cDNA sequence for clone | 63694915 R0675:A09 |
| SEQ ID NO: 1197 | is the determined cDNA sequence for clone | 63694916 R0675:A10 |
| SEQ ID NO: 1198 | is the determined cDNA sequence for clone | 63694917 R0675:A11 |
| SEQ ID NO: 1199 | is the determined cDNA sequence for clone | 63694918 R0675:A12 |
| SEQ ID NO: 1200 | is the determined cDNA sequence for clone | 63694919 R0675:B01 |
| SEQ ID NO: 1201 | is the determined cDNA sequence for clone | 63694920 R0675:B02 |
| SEQ ID NO: 1202 | is the determined cDNA sequence for clone | 63694921 R0675:B03 |
| SEQ ID NO: 1203 | is the determined cDNA sequence for clone | 63694922 R0675:B04 |
| SEQ ID NO: 1204 | is the determined cDNA sequence for clone | 63694923 R0675:B05 |
| SEQ ID NO: 1205 | is the determined cDNA sequence for clone | 63694924 R0675:B06 |
| SEQ ID NO: 1206 | is the determined cDNA sequence for clone | 63694925 R0675:B07 |
| SEQ ID NO: 1207 | is the determined cDNA sequence for clone | 63694926 R0675:B08 |
| SEQ ID NO: 1208 | is the determined cDNA sequence for clone | 63694927 R0675:B09 |
| SEQ ID NO: 1209 | is the determined cDNA sequence for clone | 63694928 R0675:B10 |
| SEQ ID NO: 1210 | is the determined cDNA sequence for clone | 63694929 R0675:B11 |
| SEQ ID NO: 1211 | is the determined cDNA sequence for clone | 63694930 R0675:B12 |
| SEQ ID NO: 1212 | is the determined cDNA sequence for clone | 63694931 R0675:C01 |
| SEQ ID NO: 1213 | is the determined cDNA sequence for clone | 63694932 R0675:C02 |
| SEQ ID NO: 1214 | is the determined cDNA sequence for clone | 63694934 R0675:C04 |
| SEQ ID NO: 1215 | is the determined cDNA sequence for clone | 63694935 R0675:C05 |
| SEQ ID NO: 1216 | is the determined cDNA sequence for clone | 63694936 R0675:C06 |
| SEQ ID NO: 1217 | is the determined cDNA sequence for clone | 63694937 R0675:C07 |
| SEQ ID NO: 1218 | is the determined cDNA sequence for clone | 63694938 R0675:C08 |
| SEQ ID NO: 1219 | is the determined cDNA sequence for clone | 63694939 R0675:C09 |
| SEQ ID NO: 1220 | is the determined cDNA sequence for clone | 63694940 R0675:C10 |
| SEQ ID NO: 1221 | is the determined cDNA sequence for clone | 63694941 R0675:C11 |
| SEQ ID NO: 1222 | is the determined cDNA sequence for clone | 63694943 R0675:D01 |
| SEQ ID NO: 1223 | is the determined cDNA sequence for clone | 63694944 R0675:D02 |
| SEQ ID NO: 1224 | is the determined cDNA sequence for clone | 63694946 R0675:D04 |
| SEQ ID NO: 1225 | is the determined cDNA sequence for clone | 63694947 R0675:D05 |
| SEQ ID NO: 1226 | is the determined cDNA sequence for clone | 63694948 R0675:D06 |
| SEQ ID NO: 1227 | is the determined cDNA sequence for clone | 63694949 R0675:D07 |
| SEQ ID NO: 1228 | is the determined cDNA sequence for clone | 63694950 R0675:D08 |
| SEQ ID NO: 1229 | is the determined cDNA sequence for clone | 63694952 R0675:D10 |
| SEQ ID NO: 1230 | is the determined cDNA sequence for clone | 63694953 R0675:D11 |
| SEQ ID NO: 1231 | is the determined cDNA sequence for clone | 63694954 R0675:D12 |
| SEQ ID NO: 1232 | is the determined cDNA sequence for clone | 63694955 R0675:E01 |
| SEQ ID NO: 1233 | is the determined cDNA sequence for clone | 63694958 R0675:E04 |
| SEQ ID NO: 1234 | is the determined cDNA sequence for clone | 63694959 R0675:E05 |
| SEQ ID NO: 1235 | is the determined cDNA sequence for clone | 63694960 R0675:E06 |
| SEQ ID NO: 1236 | is the determined cDNA sequence for clone | 63694961 R0675:E07 |
| SEQ ID NO: 1237 | is the determined cDNA sequence for clone | 63694962 R0675:E08 |
| SEQ ID NO: 1238 | is the determined cDNA sequence for clone | 63694963 R0675:E09 |
| SEQ ID NO: 1239 | is the determined cDNA sequence for clone | 63694964 R0675:E10 |
| SEQ ID NO: 1240 | is the determined cDNA sequence for clone | 63694966 R0675:E12 |
| SEQ ID NO: 1241 | is the determined cDNA sequence for clone | 63694967 R0675:F01 |
| SEQ ID NO: 1242 | is the determined cDNA sequence for clone | 63694968 R0675:F02 |
| SEQ ID NO: 1243 | is the determined cDNA sequence for clone | 63694969 R0675:F03 |
| SEQ ID NO: 1244 | is the determined cDNA sequence for clone | 63694970 R0675:F04 |
| SEQ ID NO: 1245 | is the determined cDNA sequence for clone | 63694971 R0675:F05 |
| SEQ ID NO: 1246 | is the determined cDNA sequence for clone | 63694972 R0675:F06 |
| SEQ ID NO: 1247 | is the determined cDNA sequence for clone | 63694973 R0675:F07 |
| SEQ ID NO: 1248 | is the determined cDNA sequence for clone | 63694974 R0675:F08 |
| SEQ ID NO: 1249 | is the determined cDNA sequence for clone | 63694975 R0675:F09 |
| SEQ ID NO: 1250 | is the determined cDNA sequence for clone | 63694976 R0675:F10 |
| SEQ ID NO: 1251 | is the determined cDNA sequence for clone | 63694977 R0675:F11 |
| SEQ ID NO: 1252 | is the determined cDNA sequence for clone | 63694978 R0675:F12 |
| SEQ ID NO: 1253 | is the determined cDNA sequence for clone | 63694979 R0675:G01 |
| SEQ ID NO: 1254 | is the determined cDNA sequence for clone | 63694980 R0675:G02 |
| SEQ ID NO: 1255 | is the determined cDNA sequence for clone | 63694981 R0675:G03 |
| SEQ ID NO: 1256 | is the determined cDNA sequence for clone | 63694982 R0675:G04 |
| SEQ ID NO: 1257 | is the determined cDNA sequence for clone | 63694983 R0675:G05 |
| SEQ ID NO: 1258 | is the determined cDNA sequence for clone | 63694984 R0675:G06 |
| SEQ ID NO: 1259 | is the determined cDNA sequence for clone | 63694985 R0675:G07 |
| SEQ ID NO: 1260 | is the determined cDNA sequence for clone | 63694986 R0675:G08 |
| SEQ ID NO: 1261 | is the determined cDNA sequence for clone | 63694987 R0675:G09 |
| SEQ ID NO: 1262 | is the determined cDNA sequence for clone | 63694988 R0675:G10 |
| SEQ ID NO: 1263 | is the determined cDNA sequence for clone | 63694990 R0675:G12 |
| SEQ ID NO: 1264 | is the determined cDNA sequence for clone | 63694991 R0675:H01 |
| SEQ ID NO: 1265 | is the determined cDNA sequence for clone | 63694992 R0675:H02 |
| SEQ ID NO: 1266 | is the determined cDNA sequence for clone | 63694993 R0675:H03 |
| SEQ ID NO: 1267 | is the determined cDNA sequence for clone | 63694995 R0675:H05 |
| SEQ ID NO: 1268 | is the determined cDNA sequence for clone | 63694996 R0675:H06 |
| SEQ ID NO: 1269 | is the determined cDNA sequence for clone | 63694997 R0675:H07 |
| SEQ ID NO: 1270 | is the determined cDNA sequence for clone | 63694999 R0675:H09 |
| SEQ ID NO: 1271 | is the determined cDNA sequence for clone | 63695000 R0675:H10 |
| SEQ ID NO: 1272 | is the determined cDNA sequence for clone | 63695746 R0676:A02 |
| SEQ ID NO: 1273 | is the determined cDNA sequence for clone | 63695747 R0676:A03 |
| SEQ ID NO: 1274 | is the determined cDNA sequence for clone | 63695748 R0676:A05 |
| SEQ ID NO: 1275 | is the determined cDNA sequence for clone | 63695749 R0676:A06 |
| SEQ ID NO: 1276 | is the determined cDNA sequence for clone | 63695750 R0676:A07 |
| SEQ ID NO: 1277 | is the determined cDNA sequence for clone | 63695751 R0676:A08 |
| SEQ ID NO: 1278 | is the determined cDNA sequence for clone | 63695752 R0676:A09 |
| SEQ ID NO: 1279 | is the determined cDNA sequence for clone | 63695754 R0676:A11 |
| SEQ ID NO: 1280 | is the determined cDNA sequence for clone | 63695755 R0676:A12 |
| SEQ ID NO: 1281 | is the determined cDNA sequence for clone | 63695756 R0676:B01 |
| SEQ ID NO: 1282 | is the determined cDNA sequence for clone | 63695758 R0676:B03 |
| SEQ ID NO: 1283 | is the determined cDNA sequence for clone | 63695759 R0676:B04 |
| SEQ ID NO: 1284 | is the determined cDNA sequence for clone | 63695760 R0676:B05 |
| SEQ ID NO: 1285 | is the determined cDNA sequence for clone | 63695762 R0676:B07 |
| SEQ ID NO: 1286 | is the determined cDNA sequence for clone | 63695764 R0676:B09 |
| SEQ ID NO: 1287 | is the determined cDNA sequence for clone | 63695766 R0676:B11 |
| SEQ ID NO: 1288 | is the determined cDNA sequence for clone | 63695769 R0676:C02 |
| SEQ ID NO: 1289 | is the determined cDNA sequence for clone | 63695770 R0676:C03 |
| SEQ ID NO: 1290 | is the determined cDNA sequence for clone | 63695771 R0676:C04 |
| SEQ ID NO: 1291 | is the determined cDNA sequence for clone | 63695772 R0676:C05 |
| SEQ ID NO: 1292 | is the determined cDNA sequence for clone | 63695773 R0676:C06 |
| SEQ ID NO: 1293 | is the determined cDNA sequence for clone | 63695774 R0676:C07 |
| SEQ ID NO: 1294 | is the determined cDNA sequence for clone | 63695775 R0676:C08 |
| SEQ ID NO: 1295 | is the determined cDNA sequence for clone | 63695777 R0676:C10 |
| SEQ ID NO: 1296 | is the determined cDNA sequence for clone | 63695778 R0676:C11 |
| SEQ ID NO: 1297 | is the determined cDNA sequence for clone | 63695779 R0676:C12 |
| SEQ ID NO: 1298 | is the determined cDNA sequence for clone | 63695780 R0676:D01 |
| SEQ ID NO: 1299 | is the determined cDNA sequence for clone | 63695782 R0676:D03 |
| SEQ ID NO: 1300 | is the determined cDNA sequence for clone | 63695784 R0676:D05 |
| SEQ ID NO: 1301 | is the determined cDNA sequence for clone | 63695786 R0676:D07 |
| SEQ ID NO: 1302 | is the determined cDNA sequence for clone | 63695787 R0676:D08 |
| SEQ ID NO: 1303 | is the determined cDNA sequence for clone | 63695788 R0676:D09 |
| SEQ ID NO: 1304 | is the determined cDNA sequence for clone | 63695790 R0676:D11 |
| SEQ ID NO: 1305 | is the determined cDNA sequence for clone | 63695791 R0676:D12 |
| SEQ ID NO: 1306 | is the determined cDNA sequence for clone | 63695792 R0676:E01 |
| SEQ ID NO: 1307 | is the determined cDNA sequence for clone | 63695793 R0676:E02 |
| SEQ ID NO: 1308 | is the determined cDNA sequence for clone | 63695794 R0676:E03 |
| SEQ ID NO: 1309 | is the determined cDNA sequence for clone | 63695796 R0676:E05 |
| SEQ ID NO: 1310 | is the determined cDNA sequence for clone | 63695797 R0676:E06 |
| SEQ ID NO: 1311 | is the determined cDNA sequence for clone | 63695798 R0676:E07 |
| SEQ ID NO: 1312 | is the determined cDNA sequence for clone | 63695803 R0676:E12 |
| SEQ ID NO: 1313 | is the determined cDNA sequence for clone | 63695804 R0676:F01 |
| SEQ ID NO: 1314 | is the determined cDNA sequence for clone | 63695806 R0676:F03 |
| SEQ ID NO: 1315 | is the determined cDNA sequence for clone | 63695807 R0676:F04 |
| SEQ ID NO: 1316 | is the determined cDNA sequence for clone | 63695808 R0676:F05 |
| SEQ ID NO: 1317 | is the determined cDNA sequence for clone | 63695809 R0676:F06 |
| SEQ ID NO: 1318 | is the determined cDNA sequence for clone | 63695810 R0676:F07 |
| SEQ ID NO: 1319 | is the determined cDNA sequence for clone | 63695811 R0676:F08 |
| SEQ ID NO: 1320 | is the determined cDNA sequence for clone | 63695812 R0676:F09 |
| SEQ ID NO: 1321 | is the determined cDNA sequence for clone | 63695813 R0676:F10 |
| SEQ ID NO: 1322 | is the determined cDNA sequence for clone | 63695814 R0676:F11 |
| SEQ ID NO: 1323 | is the determined cDNA sequence for clone | 63695815 R0676:F12 |
| SEQ ID NO: 1324 | is the determined cDNA sequence for clone | 63695816 R0676:G01 |
| SEQ ID NO: 1325 | is the determined cDNA sequence for clone | 63695817 R0676:G02 |
| SEQ ID NO: 1326 | is the determined cDNA sequence for clone | 63695818 R0676:G03 |
| SEQ ID NO: 1327 | is the determined cDNA sequence for clone | 63695820 R0676:G05 |
| SEQ ID NO: 1328 | is the determined cDNA sequence for clone | 63695822 R0676:G07 |
| SEQ ID NO: 1329 | is the determined cDNA sequence for clone | 63695823 R0676:G08 |
| SEQ ID NO: 1330 | is the determined cDNA sequence for clone | 63695824 R0676:G09 |
| SEQ ID NO: 1331 | is the determined cDNA sequence for clone | 63695825 R0676:G10 |
| SEQ ID NO: 1332 | is the determined cDNA sequence for clone | 63695826 R0676:G11 |
| SEQ ID NO: 1333 | is the determined cDNA sequence for clone | 63695827 R0676:G12 |
| SEQ ID NO: 1334 | is the determined cDNA sequence for clone | 63695828 R0676:H01 |
| SEQ ID NO: 1335 | is the determined cDNA sequence for clone | 63695829 R0676:H02 |
| SEQ ID NO: 1336 | is the determined cDNA sequence for clone | 63695830 R0676:H03 |
| SEQ ID NO: 1337 | is the determined cDNA sequence for clone | 63695831 R0676:H04 |
| SEQ ID NO: 1338 | is the determined cDNA sequence for clone | 63695832 R0676:H05 |
| SEQ ID NO: 1339 | is the determined cDNA sequence for clone | 63695833 R0676:H06 |
| SEQ ID NO: 1340 | is the determined cDNA sequence for clone | 63695834 R0676:H07 |
| SEQ ID NO: 1341 | is the determined cDNA sequence for clone | 63695835 R0676:H08 |
| SEQ ID NO: 1342 | is the determined cDNA sequence for clone | 63695836 R0676:H09 |
| SEQ ID NO: 1343 | is the determined cDNA sequence for clone | 63695837 R0676:H10 |
| SEQ ID NO: 1344 | is the determined cDNA sequence for clone | 63695838 R0676:H11 |
| SEQ ID NO: 1345 | is the determined cDNA sequence for clone | 63695374 R0677:A02 |
| SEQ ID NO: 1346 | is the determined cDNA sequence for clone | 63695375 R0677:A03 |
| SEQ ID NO: 1347 | is the determined cDNA sequence for clone | 63695376 R0677:A05 |
| SEQ ID NO: 1348 | is the determined cDNA sequence for clone | 63695378 R0677:A07 |
| SEQ ID NO: 1349 | is the determined cDNA sequence for clone | 63695379 R0677:A08 |
| SEQ ID NO: 1350 | is the determined cDNA sequence for clone | 63695380 R0677:A09 |
| SEQ ID NO: 1351 | is the determined cDNA sequence for clone | 63695381 R0677:A10 |
| SEQ ID NO: 1352 | is the determined cDNA sequence for clone | 63695382 R0677:A11 |
| SEQ ID NO: 1353 | is the determined cDNA sequence for clone | 63695383 R0677:A12 |
| SEQ ID NO: 1354 | is the determined cDNA sequence for clone | 63695384 R0677:B01 |
| SEQ ID NO: 1355 | is the determined cDNA sequence for clone | 63695386 R0677:B03 |
| SEQ ID NO: 1356 | is the determined cDNA sequence for clone | 63695387 R0677:B04 |
| SEQ ID NO: 1357 | is the determined cDNA sequence for clone | 63695388 R0677:B05 |
| SEQ ID NO: 1358 | is the determined cDNA sequence for clone | 63695389 R0677:B06 |
| SEQ ID NO: 1359 | is the determined cDNA sequence for clone | 63695390 R0677:B07 |
| SEQ ID NO: 1360 | is the determined cDNA sequence for clone | 63695391 R0677:B08 |
| SEQ ID NO: 1361 | is the determined cDNA sequence for clone | 63695392 R0677:B09 |
| SEQ ID NO: 1362 | is the determined cDNA sequence for clone | 63695393 R0677:B10 |
| SEQ ID NO: 1363 | is the determined cDNA sequence for clone | 63695394 R0677:B11 |
| SEQ ID NO: 1364 | is the determined cDNA sequence for clone | 63695395 R0677:B12 |
| SEQ ID NO: 1365 | is the determined cDNA sequence for clone | 63695397 R0677:C02 |
| SEQ ID NO: 1366 | is the determined cDNA sequence for clone | 63695398 R0677:C03 |
| SEQ ID NO: 1367 | is the determined cDNA sequence for clone | 63695399 R0677:C04 |
| SEQ ID NO: 1368 | is the determined cDNA sequence for clone | 63695400 R0677:C05 |
| SEQ ID NO: 1369 | is the determined cDNA sequence for clone | 63695401 R0677:C06 |
| SEQ ID NO: 1370 | is the determined cDNA sequence for clone | 63695402 R0677:C07 |
| SEQ ID NO: 1371 | is the determined cDNA sequence for clone | 63695403 R0677:C08 |
| SEQ ID NO: 1372 | is the determined cDNA sequence for clone | 63695404 R0677:C09 |
| SEQ ID NO: 1373 | is the determined cDNA sequence for clone | 63695405 R0677:C10 |
| SEQ ID NO: 1374 | is the determined cDNA sequence for clone | 63695406 R0677:C11 |
| SEQ ID NO: 1375 | is the determined cDNA sequence for clone | 63695408 R0677:D01 |
| SEQ ID NO: 1376 | is the determined cDNA sequence for clone | 63695409 R0677:D02 |
| SEQ ID NO: 1377 | is the determined cDNA sequence for clone | 63695411 R0677:D04 |
| SEQ ID NO: 1378 | is the determined cDNA sequence for clone | 63695412 R0677:D05 |
| SEQ ID NO: 1379 | is the determined cDNA sequence for clone | 63695413 R0677:D06 |
| SEQ ID NO: 1380 | is the determined cDNA sequence for clone | 63695414 R0677:D07 |
| SEQ ID NO: 1381 | is the determined cDNA sequence for clone | 63695415 R0677:D08 |
| SEQ ID NO: 1382 | is the determined cDNA sequence for clone | 63695416 R0677:D09 |
| SEQ ID NO: 1383 | is the determined cDNA sequence for clone | 63695418 R0677:D11 |
| SEQ ID NO: 1384 | is the determined cDNA sequence for clone | 63695419 R0677:D12 |
| SEQ ID NO: 1385 | is the determined cDNA sequence for clone | 63695420 R0677:E01 |
| SEQ ID NO: 1386 | is the determined cDNA sequence for clone | 63695421 R0677:E02 |
| SEQ ID NO: 1387 | is the determined cDNA sequence for clone | 63695422 R0677:E03 |
| SEQ ID NO: 1388 | is the determined cDNA sequence for clone | 63695423 R0677:E04 |
| SEQ ID NO: 1389 | is the determined cDNA sequence for clone | 63695424 R0677:E05 |
| SEQ ID NO: 1390 | is the determined cDNA sequence for clone | 63695425 R0677:E06 |
| SEQ ID NO: 1391 | is the determined cDNA sequence for clone | 63695426 R0677:E07 |
| SEQ ID NO: 1392 | is the determined cDNA sequence for clone | 63695427 R0677:E08 |
| SEQ ID NO: 1393 | is the determined cDNA sequence for clone | 63695428 R0677:E09 |
| SEQ ID NO: 1394 | is the determined cDNA sequence for clone | 63695429 R0677:E10 |
| SEQ ID NO: 1395 | is the determined cDNA sequence for clone | 63695430 R0677:E11 |
| SEQ ID NO: 1396 | is the determined cDNA sequence for clone | 63695431 R0677:E12 |
| SEQ ID NO: 1397 | is the determined cDNA sequence for clone | 63695432 R0677:F01 |
| SEQ ID NO: 1398 | is the determined cDNA sequence for clone | 63695433 R0677:F02 |
| SEQ ID NO: 1399 | is the determined cDNA sequence for clone | 63695434 R0677:F03 |
| SEQ ID NO: 1400 | is the determined cDNA sequence for clone | 63695435 R0677:F04 |
| SEQ ID NO: 1401 | is the determined cDNA sequence for clone | 63695436 R0677:F05 |
| SEQ ID NO: 1402 | is the determined cDNA sequence for clone | 63695437 R0677:F06 |
| SEQ ID NO: 1403 | is the determined cDNA sequence for clone | 63695439 R0677:F08 |
| SEQ ID NO: 1404 | is the determined cDNA sequence for clone | 63695440 R0677:F09 |
| SEQ ID NO: 1405 | is the determined cDNA sequence for clone | 63695442 R0677:F11 |
| SEQ ID NO: 1406 | is the determined cDNA sequence for clone | 63695443 R0677:F12 |
| SEQ ID NO: 1407 | is the determined cDNA sequence for clone | 63695444 R0677:G01 |
| SEQ ID NO: 1408 | is the determined cDNA sequence for clone | 63695445 R0677:G02 |
| SEQ ID NO: 1409 | is the determined cDNA sequence for clone | 63695446 R0677:G03 |
| SEQ ID NO: 1410 | is the determined cDNA sequence for clone | 63695447 R0677:G04 |
| SEQ ID NO: 1411 | is the determined cDNA sequence for clone | 63695448 R0677:G05 |
| SEQ ID NO: 1412 | is the determined cDNA sequence for clone | 63695449 R0677:G06 |
| SEQ ID NO: 1413 | is the determined cDNA sequence for clone | 63695450 R0677:G07 |
| SEQ ID NO: 1414 | is the determined cDNA sequence for clone | 63695451 R0677:G08 |
| SEQ ID NO: 1415 | is the determined cDNA sequence for clone | 63695452 R0677:G09 |
| SEQ ID NO: 1416 | is the determined cDNA sequence for clone | 63695453 R0677:G10 |
| SEQ ID NO: 1417 | is the determined cDNA sequence for clone | 63695454 R0677:G11 |
| SEQ ID NO: 1418 | is the determined cDNA sequence for clone | 63695455 R0677:G12 |
| SEQ ID NO: 1419 | is the determined cDNA sequence for clone | 63695456 R0677:H01 |
| SEQ ID NO: 1420 | is the determined cDNA sequence for clone | 63695457 R0677:H02 |
| SEQ ID NO: 1421 | is the determined cDNA sequence for clone | 63695458 R0677:H03 |
| SEQ ID NO: 1422 | is the determined cDNA sequence for clone | 63695459 R0677:H04 |
| SEQ ID NO: 1423 | is the determined cDNA sequence for clone | 63695460 R0677:H05 |
| SEQ ID NO: 1424 | is the determined cDNA sequence for clone | 63695461 R0677:H06 |
| SEQ ID NO: 1425 | is the determined cDNA sequence for clone | 63695462 R0677:H07 |
| SEQ ID NO: 1426 | is the determined cDNA sequence for clone | 63695463 R0677:H08 |
| SEQ ID NO: 1427 | is the determined cDNA sequence for clone | 63695464 R0677:H09 |
| SEQ ID NO: 1428 | is the determined cDNA sequence for clone | 63695465 R0677:H10 |
| SEQ ID NO: 1429 | is the determined cDNA sequence for clone | 63695466 R0677:H11 |
| SEQ ID NO: 1430 | is the determined cDNA sequence for clone | 63708283 R0678:A02 |
| SEQ ID NO: 1431 | is the determined cDNA sequence for clone | 63708284 R0678:A03 |
| SEQ ID NO: 1432 | is the determined cDNA sequence for clone | 63708285 R0678:A05 |
| SEQ ID NO: 1433 | is the determined cDNA sequence for clone | 63708286 R0678:A06 |
| SEQ ID NO: 1434 | is the determined cDNA sequence for clone | 63708287 R0678:A07 |
| SEQ ID NO: 1435 | is the determined cDNA sequence for clone | 63708289 R0678:A09 |
| SEQ ID NO: 1436 | is the determined cDNA sequence for clone | 63708290 R0678:A10 |
| SEQ ID NO: 1437 | is the determined cDNA sequence for clone | 63708291 R0678:A11 |
| SEQ ID NO: 1438 | is the determined cDNA sequence for clone | 63708292 R0678:A12 |
| SEQ ID NO: 1439 | is the determined cDNA sequence for clone | 63708293 R0678:B01 |
| SEQ ID NO: 1440 | is the determined cDNA sequence for clone | 63708294 R0678:B02 |
| SEQ ID NO: 1441 | is the determined cDNA sequence for clone | 63708295 R0678:B03 |
| SEQ ID NO: 1442 | is the determined cDNA sequence for clone | 63708296 R0678:B04 |
| SEQ ID NO: 1443 | is the determined cDNA sequence for clone | 63708297 R0678:B05 |
| SEQ ID NO: 1444 | is the determined cDNA sequence for clone | 63708298 R0678:B06 |
| SEQ ID NO: 1445 | is the determined cDNA sequence for clone | 63708299 R0678:B07 |
| SEQ ID NO: 1446 | is the determined cDNA sequence for clone | 63708300 R0678:B08 |
| SEQ ID NO: 1447 | is the determined cDNA sequence for clone | 63708302 R0678:B10 |
| SEQ ID NO: 1448 | is the determined cDNA sequence for clone | 63708304 R0678:B12 |
| SEQ ID NO: 1449 | is the determined cDNA sequence for clone | 63708305 R0678:C01 |
| SEQ ID NO: 1450 | is the determined cDNA sequence for clone | 63708306 R0678:C02 |
| SEQ ID NO: 1451 | is the determined cDNA sequence for clone | 63708307 R0678:C03 |
| SEQ ID NO: 1452 | is the determined cDNA sequence for clone | 63708308 R0678:C04 |
| SEQ ID NO: 1453 | is the determined cDNA sequence for clone | 63708309 R0678:C05 |
| SEQ ID NO: 1454 | is the determined cDNA sequence for clone | 63708311 R0678:C07 |
| SEQ ID NO: 1455 | is the determined cDNA sequence for clone | 63708313 R0678:C09 |
| SEQ ID NO: 1456 | is the determined cDNA sequence for clone | 63708314 R0678:C10 |
| SEQ ID NO: 1457 | is the determined cDNA sequence for clone | 63708315 R0678:C11 |
| SEQ ID NO: 1458 | is the determined cDNA sequence for clone | 63708316 R0678:C12 |
| SEQ ID NO: 1459 | is the determined cDNA sequence for clone | 63708317 R0678:D01 |
| SEQ ID NO: 1460 | is the determined cDNA sequence for clone | 63708318 R0678:D02 |
| SEQ ID NO: 1461 | is the determined cDNA sequence for clone | 63708319 R0678:D03 |
| SEQ ID NO: 1462 | is the determined cDNA sequence for clone | 63708321 R0678:D05 |
| SEQ ID NO: 1463 | is the determined cDNA sequence for clone | 63708322 R0678:D06 |
| SEQ ID NO: 1464 | is the determined cDNA sequence for clone | 63708323 R0678:D07 |
| SEQ ID NO: 1465 | is the determined cDNA sequence for clone | 63708324 R0678:D08 |
| SEQ ID NO: 1466 | is the determined cDNA sequence for clone | 63708325 R0678:D09 |
| SEQ ID NO: 1467 | is the determined cDNA sequence for clone | 63708326 R0678:D10 |
| SEQ ID NO: 1468 | is the determined cDNA sequence for clone | 63708327 R0678:D11 |
| SEQ ID NO: 1469 | is the determined cDNA sequence for clone | 63708328 R0678:D12 |
| SEQ ID NO: 1470 | is the determined cDNA sequence for clone | 63708330 R0678:E02 |
| SEQ ID NO: 1471 | is the determined cDNA sequence for clone | 63708331 R0678:E03 |
| SEQ ID NO: 1472 | is the determined cDNA sequence for clone | 63708332 R0678:E04 |
| SEQ ID NO: 1473 | is the determined cDNA sequence for clone | 63708333 R0678:E05 |
| SEQ ID NO: 1474 | is the determined cDNA sequence for clone | 63708334 R0678:E06 |
| SEQ ID NO: 1475 | is the determined cDNA sequence for clone | 63708335 R0678:E07 |
| SEQ ID NO: 1476 | is the determined cDNA sequence for clone | 63708336 R0678:E08 |
| SEQ ID NO: 1477 | is the determined cDNA sequence for clone | 63708337 R0678:E09 |
| SEQ ID NO: 1478 | is the determined cDNA sequence for clone | 63708338 R0678:E10 |
| SEQ ID NO: 1479 | is the determined cDNA sequence for clone | 63708339 R0678:E11 |
| SEQ ID NO: 1480 | is the determined cDNA sequence for clone | 63708340 R0678:E12 |
| SEQ ID NO: 1481 | is the determined cDNA sequence for clone | 63708341 R0678:F01 |
| SEQ ID NO: 1482 | is the determined cDNA sequence for clone | 63708342 R0678:F02 |
| SEQ ID NO: 1483 | is the determined cDNA sequence for clone | 63708343 R0678:F03 |
| SEQ ID NO: 1484 | is the determined cDNA sequence for clone | 63708344 R0678:F04 |
| SEQ ID NO: 1485 | is the determined cDNA sequence for clone | 63708345 R0678:F05 |
| SEQ ID NO: 1486 | is the determined cDNA sequence for clone | 63708346 R0678:F06 |
| SEQ ID NO: 1487 | is the determined cDNA sequence for clone | 63708347 R0678:F07 |
| SEQ ID NO: 1488 | is the determined cDNA sequence for clone | 63708348 R0678:F08 |
| SEQ ID NO: 1489 | is the determined cDNA sequence for clone | 63708349 R0678:F09 |
| SEQ ID NO: 1490 | is the determined cDNA sequence for clone | 63708350 R0678:F10 |
| SEQ ID NO: 1491 | is the determined cDNA sequence for clone | 63708352 R0678:F12 |
| SEQ ID NO: 1492 | is the determined cDNA sequence for clone | 63708354 R0678:G02 |
| SEQ ID NO: 1493 | is the determined cDNA sequence for clone | 63708355 R0678:G03 |
| SEQ ID NO: 1494 | is the determined cDNA sequence for clone | 63708356 R0678:G04 |
| SEQ ID NO: 1495 | is the determined cDNA sequence for clone | 63708357 R0678:G05 |
| SEQ ID NO: 1496 | is the determined cDNA sequence for clone | 63708358 R0678:G06 |
| SEQ ID NO: 1497 | is the determined cDNA sequence for clone | 63708359 R0678:G07 |
| SEQ ID NO: 1498 | is the determined cDNA sequence for clone | 63708361 R0678:G09 |
| SEQ ID NO: 1499 | is the determined cDNA sequence for clone | 63708362 R0678:G10 |
| SEQ ID NO: 1500 | is the determined cDNA sequence for clone | 63708363 R0678:G11 |
| SEQ ID NO: 1501 | is the determined cDNA sequence for clone | 63708365 R0678:H01 |
| SEQ ID NO: 1502 | is the determined cDNA sequence for clone | 63708366 R0678:H02 |
| SEQ ID NO: 1503 | is the determined cDNA sequence for clone | 63708367 R0678:H03 |
| SEQ ID NO: 1504 | is the determined cDNA sequence for clone | 63708370 R0678:H06 |
| SEQ ID NO: 1505 | is the determined cDNA sequence for clone | 63708371 R0678:H07 |
| SEQ ID NO: 1506 | is the determined cDNA sequence for clone | 63708372 R0678:H08 |
| SEQ ID NO: 1507 | is the determined cDNA sequence for clone | 63708373 R0678:H09 |
| SEQ ID NO: 1508 | is the determined cDNA sequence for clone | 63708374 R0678:H10 |
| SEQ ID NO: 1509 | is the determined cDNA sequence for clone | 63708375 R0678:H11 |
| SEQ ID NO: 1510 | is the determined cDNA sequence for clone | 63695560 R0679:A02 |
| SEQ ID NO: 1511 | is the determined cDNA sequence for clone | 63695561 R0679:A03 |
| SEQ ID NO: 1512 | is the determined cDNA sequence for clone | 63695562 R0679:A05 |
| SEQ ID NO: 1513 | is the determined cDNA sequence for clone | 63695563 R0679:A06 |
| SEQ ID NO: 1514 | is the determined cDNA sequence for clone | 63695564 R0679:A07 |
| SEQ ID NO: 1515 | is the determined cDNA sequence for clone | 63695565 R0679:A08 |
| SEQ ID NO: 1516 | is the determined cDNA sequence for clone | 63695566 R0679:A09 |
| SEQ ID NO: 1517 | is the determined cDNA sequence for clone | 63695567 R0679:A10 |
| SEQ ID NO: 1518 | is the determined cDNA sequence for clone | 63695568 R0679:A11 |
| SEQ ID NO: 1519 | is the determined cDNA sequence for clone | 63695569 R0679:A12 |
| SEQ ID NO: 1520 | is the determined cDNA sequence for clone | 63695570 R0679:B01 |
| SEQ ID NO: 1521 | is the determined cDNA sequence for clone | 63695571 R0679:B02 |
| SEQ ID NO: 1522 | is the determined cDNA sequence for clone | 63695572 R0679:B03 |
| SEQ ID NO: 1523 | is the determined cDNA sequence for clone | 63695573 R0679:B04 |
| SEQ ID NO: 1524 | is the determined cDNA sequence for clone | 63695574 R0679:B05 |
| SEQ ID NO: 1525 | is the determined cDNA sequence for clone | 63695575 R0679:B06 |
| SEQ ID NO: 1526 | is the determined cDNA sequence for clone | 63695576 R0679:B07 |
| SEQ ID NO: 1527 | is the determined cDNA sequence for clone | 63695577 R0679:B08 |
| SEQ ID NO: 1528 | is the determined cDNA sequence for clone | 63695578 R0679:B09 |
| SEQ ID NO: 1529 | is the determined cDNA sequence for clone | 63695579 R0679:B10 |
| SEQ ID NO: 1530 | is the determined cDNA sequence for clone | 63695580 R0679:B11 |
| SEQ ID NO: 1531 | is the determined cDNA sequence for clone | 63695581 R0679:B12 |
| SEQ ID NO: 1532 | is the determined cDNA sequence for clone | 63695582 R0679:C01 |
| SEQ ID NO: 1533 | is the determined cDNA sequence for clone | 63695583 R0679:C02 |
| SEQ ID NO: 1534 | is the determined cDNA sequence for clone | 63695586 R0679:C05 |
| SEQ ID NO: 1535 | is the determined cDNA sequence for clone | 63695587 R0679:C06 |
| SEQ ID NO: 1536 | is the determined cDNA sequence for clone | 63695589 R0679:C08 |
| SEQ ID NO: 1537 | is the determined cDNA sequence for clone | 63695590 R0679:C09 |
| SEQ ID NO: 1538 | is the determined cDNA sequence for clone | 63695591 R0679:C10 |
| SEQ ID NO: 1539 | is the determined cDNA sequence for clone | 63695592 R0679:C11 |
| SEQ ID NO: 1540 | is the determined cDNA sequence for clone | 63695593 R0679:C12 |
| SEQ ID NO: 1541 | is the determined cDNA sequence for clone | 63695594 R0679:D01 |
| SEQ ID NO: 1542 | is the determined cDNA sequence for clone | 63695595 R0679:D02 |
| SEQ ID NO: 1543 | is the determined cDNA sequence for clone | 63695596 R0679:D03 |
| SEQ ID NO: 1544 | is the determined cDNA sequence for clone | 63695597 R0679:D04 |
| SEQ ID NO: 1545 | is the determined cDNA sequence for clone | 63695598 R0679:D05 |
| SEQ ID NO: 1546 | is the determined cDNA sequence for clone | 63695599 R0679:D06 |
| SEQ ID NO: 1547 | is the determined cDNA sequence for clone | 63695600 R0679:D07 |
| SEQ ID NO: 1548 | is the determined cDNA sequence for clone | 63695602 R0679:D09 |
| SEQ ID NO: 1549 | is the determined cDNA sequence for clone | 63695603 R0679:D10 |
| SEQ ID NO: 1550 | is the determined cDNA sequence for clone | 63695604 R0679:D11 |
| SEQ ID NO: 1551 | is the determined cDNA sequence for clone | 63695605 R0679:D12 |
| SEQ ID NO: 1552 | is the determined cDNA sequence for clone | 63695606 R0679:E01 |
| SEQ ID NO: 1553 | is the determined cDNA sequence for clone | 63695608 R0679:E03 |
| SEQ ID NO: 1554 | is the determined cDNA sequence for clone | 63695609 R0679:E04 |
| SEQ ID NO: 1555 | is the determined cDNA sequence for clone | 63695610 R0679:E05 |
| SEQ ID NO: 1556 | is the determined cDNA sequence for clone | 63695611 R0679:E06 |
| SEQ ID NO: 1557 | is the determined cDNA sequence for clone | 63695612 R0679:E07 |
| SEQ ID NO: 1558 | is the determined cDNA sequence for clone | 63695613 R0679:E08 |
| SEQ ID NO: 1559 | is the determined cDNA sequence for clone | 63695614 R0679:E09 |
| SEQ ID NO: 1560 | is the determined cDNA sequence for clone | 63695615 R0679:E10 |
| SEQ ID NO: 1561 | is the determined cDNA sequence for clone | 63695616 R0679:E11 |
| SEQ ID NO: 1562 | is the determined cDNA sequence for clone | 63695617 R0679:E12 |
| SEQ ID NO: 1563 | is the determined cDNA sequence for clone | 63695618 R0679:F01 |
| SEQ ID NO: 1564 | is the determined cDNA sequence for clone | 63695619 R0679:F02 |
| SEQ ID NO: 1565 | is the determined cDNA sequence for clone | 63695620 R0679:F03 |
| SEQ ID NO: 1566 | is the determined cDNA sequence for clone | 63695622 R0679:F05 |
| SEQ ID NO: 1567 | is the determined cDNA sequence for clone | 63695623 R0679:F06 |
| SEQ ID NO: 1568 | is the determined cDNA sequence for clone | 63695624 R0679:F07 |
| SEQ ID NO: 1569 | is the determined cDNA sequence for clone | 63695625 R0679:F08 |
| SEQ ID NO: 1570 | is the determined cDNA sequence for clone | 63695626 R0679:F09 |
| SEQ ID NO: 1571 | is the determined cDNA sequence for clone | 63695627 R0679:F10 |
| SEQ ID NO: 1572 | is the determined cDNA sequence for clone | 63695629 R0679:F12 |
| SEQ ID NO: 1573 | is the determined cDNA sequence for clone | 63695630 R0679:G01 |
| SEQ ID NO: 1574 | is the determined cDNA sequence for clone | 63695631 R0679:G02 |
| SEQ ID NO: 1575 | is the determined cDNA sequence for clone | 63695633 R0679:G04 |
| SEQ ID NO: 1576 | is the determined cDNA sequence for clone | 63695635 R0679:G06 |
| SEQ ID NO: 1577 | is the determined cDNA sequence for clone | 63695636 R0679:G07 |
| SEQ ID NO: 1578 | is the determined cDNA sequence for clone | 63695637 R0679:G08 |
| SEQ ID NO: 1579 | is the determined cDNA sequence for clone | 63695640 R0679:G11 |
| SEQ ID NO: 1580 | is the determined cDNA sequence for clone | 63695641 R0679:G12 |
| SEQ ID NO: 1581 | is the determined cDNA sequence for clone | 63695642 R0679:H01 |
| SEQ ID NO: 1582 | is the determined cDNA sequence for clone | 63695643 R0679:H02 |
| SEQ ID NO: 1583 | is the determined cDNA sequence for clone | 63695644 R0679:H03 |
| SEQ ID NO: 1584 | is the determined cDNA sequence for clone | 63695645 R0679:H04 |
| SEQ ID NO: 1585 | is the determined cDNA sequence for clone | 63695646 R0679:H05 |
| SEQ ID NO: 1586 | is the determined cDNA sequence for clone | 63695647 R0679:H06 |
| SEQ ID NO: 1587 | is the determined cDNA sequence for clone | 63695649 R0679:H08 |
| SEQ ID NO: 1588 | is the determined cDNA sequence for clone | 63695650 R0679:H09 |
| SEQ ID NO: 1589 | is the determined cDNA sequence for clone | 63695652 R0679:H11 |
| SEQ ID NO: 1590 | is the determined cDNA sequence for clone | 63695468 R0680:A03 |
| SEQ ID NO: 1591 | is the determined cDNA sequence for clone | 63695469 R0680:A05 |
| SEQ ID NO: 1592 | is the determined cDNA sequence for clone | 63695470 R0680:A06 |
| SEQ ID NO: 1593 | is the determined cDNA sequence for clone | 63695471 R0680:A07 |
| SEQ ID NO: 1594 | is the determined cDNA sequence for clone | 63695472 R0680:A08 |
| SEQ ID NO: 1595 | is the determined cDNA sequence for clone | 63695473 R0680:A09 |
| SEQ ID NO: 1596 | is the determined cDNA sequence for clone | 63695474 R0680:A10 |
| SEQ ID NO: 1597 | is the determined cDNA sequence for clone | 63695475 R0680:A11 |
| SEQ ID NO: 1598 | is the determined cDNA sequence for clone | 63695476 R0680:A12 |
| SEQ ID NO: 1599 | is the determined cDNA sequence for clone | 63695477 R0680:B01 |
| SEQ ID NO: 1600 | is the determined cDNA sequence for clone | 63695478 R0680:B02 |
| SEQ ID NO: 1601 | is the determined cDNA sequence for clone | 63695480 R0680:B04 |
| SEQ ID NO: 1602 | is the determined cDNA sequence for clone | 63695482 R0680:B06 |
| SEQ ID NO: 1603 | is the determined cDNA sequence for clone | 63695483 R0680:B07 |
| SEQ ID NO: 1604 | is the determined cDNA sequence for clone | 63695484 R0680:B08 |
| SEQ ID NO: 1605 | is the determined cDNA sequence for clone | 63695485 R0680:B09 |
| SEQ ID NO: 1606 | is the determined cDNA sequence for clone | 63695486 R0680:B10 |
| SEQ ID NO: 1607 | is the determined cDNA sequence for clone | 63695487 R0680:B11 |
| SEQ ID NO: 1608 | is the determined cDNA sequence for clone | 63695488 R0680:B12 |
| SEQ ID NO: 1609 | is the determined cDNA sequence for clone | 63695489 R0680:C01 |
| SEQ ID NO: 1610 | is the determined cDNA sequence for clone | 63695490 R0680:C02 |
| SEQ ID NO: 1611 | is the determined cDNA sequence for clone | 63695491 R0680:C03 |
| SEQ ID NO: 1612 | is the determined cDNA sequence for clone | 63695492 R0680:C04 |
| SEQ ID NO: 1613 | is the determined cDNA sequence for clone | 63695495 R0680:C07 |
| SEQ ID NO: 1614 | is the determined cDNA sequence for clone | 63695496 R0680:C08 |
| SEQ ID NO: 1615 | is the determined cDNA sequence for clone | 63695497 R0680:C09 |
| SEQ ID NO: 1616 | is the determined cDNA sequence for clone | 63695498 R0680:C10 |
| SEQ ID NO: 1617 | is the determined cDNA sequence for clone | 63695499 R0680:C11 |
| SEQ ID NO: 1618 | is the determined cDNA sequence for clone | 63695501 R0680:D01 |
| SEQ ID NO: 1619 | is the determined cDNA sequence for clone | 63695502 R0680:D02 |
| SEQ ID NO: 1620 | is the determined cDNA sequence for clone | 63695503 R0680:D03 |
| SEQ ID NO: 1621 | is the determined cDNA sequence for clone | 63695504 R0680:D04 |
| SEQ ID NO: 1622 | is the determined cDNA sequence for clone | 63695507 R0680:D07 |
| SEQ ID NO: 1623 | is the determined cDNA sequence for clone | 63695509 R0680:D09 |
| SEQ ID NO: 1624 | is the determined cDNA sequence for clone | 63695510 R0680:D10 |
| SEQ ID NO: 1625 | is the determined cDNA sequence for clone | 63695511 R0680:D11 |
| SEQ ID NO: 1626 | is the determined cDNA sequence for clone | 63695512 R0680:D12 |
| SEQ ID NO: 1627 | is the determined cDNA sequence for clone | 63695513 R0680:E01 |
| SEQ ID NO: 1628 | is the determined cDNA sequence for clone | 63695515 R0680:E03 |
| SEQ ID NO: 1629 | is the determined cDNA sequence for clone | 63695516 R0680:E04 |
| SEQ ID NO: 1630 | is the determined cDNA sequence for clone | 63695518 R0680:E06 |
| SEQ ID NO: 1631 | is the determined cDNA sequence for clone | 63695519 R0680:E07 |
| SEQ ID NO: 1632 | is the determined cDNA sequence for clone | 63695520 R0680:E08 |
| SEQ ID NO: 1633 | is the determined cDNA sequence for clone | 63695521 R0680:E09 |
| SEQ ID NO: 1634 | is the determined cDNA sequence for clone | 63695522 R0680:E10 |
| SEQ ID NO: 1635 | is the determined cDNA sequence for clone | 63695523 R0680:E11 |
| SEQ ID NO: 1636 | is the determined cDNA sequence for clone | 63695524 R0680:E12 |
| SEQ ID NO: 1637 | is the determined cDNA sequence for clone | 63695525 R0680:F01 |
| SEQ ID NO: 1638 | is the determined cDNA sequence for clone | 63695526 R0680:F02 |
| SEQ ID NO: 1639 | is the determined cDNA sequence for clone | 63695527 R0680:F03 |
| SEQ ID NO: 1640 | is the determined cDNA sequence for clone | 63695528 R0680:F04 |
| SEQ ID NO: 1641 | is the determined cDNA sequence for clone | 63695530 R0680:F06 |
| SEQ ID NO: 1642 | is the determined cDNA sequence for clone | 63695532 R0680:F08 |
| SEQ ID NO: 1643 | is the determined cDNA sequence for clone | 63695534 R0680:F10 |
| SEQ ID NO: 1644 | is the determined cDNA sequence for clone | 63695535 R0680:F11 |
| SEQ ID NO: 1645 | is the determined cDNA sequence for clone | 63695536 R0680:F12 |
| SEQ ID NO: 1646 | is the determined cDNA sequence for clone | 63695537 R0680:G01 |
| SEQ ID NO: 1647 | is the determined cDNA sequence for clone | 63695538 R0680:G02 |
| SEQ ID NO: 1648 | is the determined cDNA sequence for clone | 63695539 R0680:G03 |
| SEQ ID NO: 1649 | is the determined cDNA sequence for clone | 63695540 R0680:G04 |
| SEQ ID NO: 1650 | is the determined cDNA sequence for clone | 63695542 R0680:G06 |
| SEQ ID NO: 165l | is the determined cDNA sequence for clone | 63695544 R0680:G08 |
| SEQ ID NO: 1652 | is the determined cDNA sequence for clone | 63695545 R0680:G09 |
| SEQ ID NO: 1653 | is the determined cDNA sequence for clone | 63695546 R0680:G10 |
| SEQ ID NO: 1654 | is the determined cDNA sequence for clone | 63695547 R0680:G11 |
| SEQ ID NO: 1655 | is the determined cDNA sequence for clone | 63695549 R0680:H01 |
| SEQ ID NO: 1656 | is the determined cDNA sequence for clone | 63695551 R0680:H03 |
| SEQ ID NO: 1657 | is the determined cDNA sequence for clone | 63695552 R0680:H04 |
| SEQ ID NO: 1658 | is the determined cDNA sequence for clone | 63695554 R0680:H06 |
| SEQ ID NO: 1659 | is the determined cDNA sequence for clone | 63695556 R0680:H08 |
| SEQ ID NO: 1660 | is the determined cDNA sequence for clone | 63695559 R0680:H11 |
| SEQ ID NO: 1661 | is the determined cDNA sequence for clone | 673.A9 |
| SEQ ID NO: 1662 | is the determined cDNA sequence for clone | 673.H12 |
| SEQ ID NO: 1663 | is the determined cDNA sequence for clone | 674.A7.GI:12728304 |
| SEQ ID NO: 1664 | is the determined cDNA sequence for clone | 674.A7 |
| SEQ ID NO: 1665 | is the determined cDNA sequence for clone | 675.G9.GI:12736649 |
| SEQ ID NO: 1666 | is the determined cDNA sequence for clone | 675.G9 |
| SEQ ID NO: 1667 | is the determined cDNA sequence for clone | 675.A11.GI:10435821 |
| SEQ ID NO: 1668 | is the determined cDNA sequence for clone | 675.A11 |
| SEQ ID NO: 1669 | is the determined cDNA sequence for clone | 676.F9 |
| SEQ ID NO: 1670 | is the determined cDNA sequence for clone | 677.F11 |
| SEQ ID NO: 1671 | is the determined cDNA sequence for clone | 680.F1.GI:3088574 |
| SEQ ID NO: 1672 | is the determined cDNA sequence for clone | 680.F1 |
| SEQ ID NO: 1673 | is the determined cDNA sequence for clone | 680.H3.GI:12652924 |
| SEQ ID NO: 1674 | is the determined cDNA sequence for clone | 680.H3 |
| SEQ ID NO: 1675 | is the determined cDNA sequence for clone | 680.B11 |
| SEQ ID NO: 1676 | is the determined cDNA sequence for clone | 685.F11 |
| SEQ ID NO: 1677 | is the determined cDNA sequence for clone | 687.B3.72249 |
| SEQ ID NO: 1678 | is the determined cDNA sequence for clone | 678.D2.GI:12734542 |
| SEQ ID NO: 1679 | is the determined cDNA sequence for clone | 678.D2.72899 |
| SEQ ID NO: 1680 | is the determined cDNA sequence for clone | 683.G3.GI:4185790 |
| SEQ ID NO: 1681 | is the determined cDNA sequence for clone | 683.G3.70426 |
| SEQ ID NO: 1682 | is the determined cDNA sequence for clone | 673.E12.GI:10436905 |
| SEQ ID NO: 1683 | is the determined cDNA sequence for clone | 673.E12.72901 |
| SEQ ID NO: 1684 | is the determined cDNA sequence for clone | 672.E3 |
| SEQ ID NO: 1685 | is the determined cDNA sequence for clone | 672.E3.72233 |
| SEQ ID NO: 1686 | is the determined cDNA sequence for clone | 677.C7.GI:10434626 |
| SEQ ID NO: 1687 | is the determined cDNA sequence for clone | 677.C7.72240 |
| SEQ ID NO: 1688 | is the determined cDNA sequence for clone | 678.E10.GI:12733361 |
| SEQ ID NO: 1689 | is the determined cDNA sequence for clone | 678.E10.72242 |
| SEQ ID NO: 1690 | is the determined cDNA sequence for clone | 679.C11.GI:13111934 |
| SEQ ID NO: 1691 | is the determined cDNA sequence for clone | 679.C11.72243 |
| SEQ ID NO: 1692 | is the determined cDNA sequence for clone | 674.D10.71575 |
| SEQ ID NO: 1693 | is the determined cDNA sequence for clone | 664.B3.GI:11526264 |
| SEQ ID NO: 1694 | is the determined cDNA sequence for clone | 664.B3.71569 |
| SEQ ID NO: 1695 | is the determined cDNA sequence for clone | 670.A3.71571 |
| SEQ ID NO: 1696 | is the determined cDNA sequence for clone | 665.B9.GI:12737771. |
| SEQ ID NO: 1697 | is the determined cDNA sequence for clone | 665.B9.70580 |
| SEQ ID NO: 1698 | is the determined cDNA sequence for clone | 676G4(70581). |
| | | 678H12(70582). |
| | | 681B5(70586). |
| | | 682E4(70589) |
| SEQ ID NO: 1699 | is the determined cDNA sequence for clone | 681.F7.GI:12737278. |
| SEQ ID NO: 1700 | is the determined cDNA sequence for clone | 681.F7.70587 |
| SEQ ID NO: 1701 | is the determined cDNA sequence for clone | 681.H11.GI:12655152 |
| SEQ ID NO: 1702 | is the determined cDNA sequence for clone | 681.H11.70584 |
| SEQ ID NO: 1703 | is the determined cDNA sequence for clone | 681.H3.GI:11427606 |
| SEQ ID NO: 1704 | is the determined cDNA sequence for clone | 681.H3.70588 |
| SEQ ID NO: 1705 | is the determined cDNA sequence for clone | ‘70984.1’ |
| SEQ ID NO: 1706 | is the determined cDNA sequence for clone | ‘70985.1’ |
| SEQ ID NO: 1707 | is the determined cDNA sequence for clone | ‘70990.1’ |
| SEQ ID NO: 1708 | is the determined cDNA sequence for clone | ‘70991.1’ |
| SEQ ID NO: 1709 | is the determined cDNA sequence for clone | 4.contig.GI:11427276 |
| SEQ ID NO: 1710 | is the determined cDNA sequence for clone | ‘71023.1’ |
| SEQ ID NO: 1711 | is the determined cDNA sequence for clone | 5.contig.GI:11422221 |
| SEQ ID NO: 1712 | is the determined cDNA sequence for clone | ‘71016.1’ |
| SEQ ID NO: 1713 | is the determined cDNA sequence for clone | ‘71003.1’ |
| SEQ ID NO: 1714 | is the determined cDNA sequence for clone | 7.contig.GI:6330128 |
| SEQ ID NO: 1715 | is the determined cDNA sequence for clone | ‘71043.1’ |
| SEQ ID NO: 1716 | is the determined cDNA sequence for clone | 8.contig.GI:11526264 |
| SEQ ID NO: 1717 | is the determined cDNA sequence for clone | ‘710001’ |
| SEQ ID NO: 1718 | is the determined cDNA sequence for clone | ‘71033.1’ |
| SEQ ID NO: 1719 | is the determined cDNA sequence for clone | 9.contig.GI:7657545 |
| SEQ ID NO: 1720 | is the determined cDNA sequence for clone | ‘70989.1’ |
| SEQ ID NO: 1721 | is the determined cDNA sequence for clone | 10.contig.GI:482908 |
| SEQ ID NO: 1722 | is the determined cDNA sequence for clone | ‘71040.1’ |
| SEQ ID NO: 1723 | is the determined cDNA sequence for clone | ‘71035.1’ |
| SEQ ID NO: 1724 | is the determined cDNA sequence for clone | ‘71038.1’ |
| SEQ ID NO: 1725 | is the determined cDNA sequence for clone | ‘71007.1’ |
| SEQ ID NO: 1726 | is the determined cDNA sequence for clone | ‘71047.1’ |
| SEQ ID NO: 1727 | is the determined cDNA sequence for clone | 14.contig.GI:4096861 |
| SEQ ID NO: 1728 | is the determined cDNA sequence for clone | ‘71013.1’ |
| SEQ ID NO: 1729 | is the determined cDNA sequence for clone | ‘70983.1’ |
| SEQ ID NO: 1730 | is the determined cDNA sequence for clone | ‘71027.1’ |
| SEQ ID NO: 1731 | is the determined cDNA sequence for clone | 16.Contig.GI:11419857 |
| SEQ ID NO: 1732 | is the determined cDNA sequence for clone | ‘71054.1’ |
| SEQ ID NO: 1733 | is the determined cDNA sequence for clone | ‘71041.1’ |
| SEQ ID NO: 1734 | is the determined cDNA sequence for clone | ‘71031.1’ |
| SEQ ID NO: 1735 | is the determined cDNA sequence for clone | ‘71034.1’ |
| SEQ ID NO: 1736 | is the determined cDNA sequence for clone | ‘71019.1’ |
| SEQ ID NO: 1737 | is the determined cDNA sequence for clone | ‘71050.1’ |
| SEQ ID NO: 1738 | is the determined cDNA sequence for clone | 23.contig.GI:4502778 |
| SEQ ID NO: 1739 | is the determined cDNA sequence for clone | ‘71010.1’ |
| SEQ ID NO: 1740 | is the determined cDNA sequence for clone | 24.Contig.GI:6005991 |
| SEQ ID NO: 1741 | is the determined cDNA sequence for clone | ‘71044.1’ |
| SEQ ID NO: 1742 | is the determined cDNA sequence for clone | ‘70996.1’ |
| SEQ ID NO: 1743 | is the determined cDNA sequence for clone | 26.Contig.GI:177801 |
| SEQ ID NO: 1744 | is the determined cDNA sequence for clone | ‘71060.1’ |
| SEQ ID NO: 1745 | is the determined cDNA sequence for clone | 27.Contig.GI:10439726 |
| SEQ ID NO: 1746 | is the determined cDNA sequence for clone | ‘71057.1’ |
| SEQ ID NO: 1747 | is the determined cDNA sequence for clone | ‘71001.1’ |
| SEQ ID NO: 1748 | is the determined cDNA sequence for clone | 29.contig.gbID.11429588 |
| SEQ ID NO: 1749 | is the determined cDNA sequence for clone | ‘70971.1’ |
| SEQ ID NO: 1750 | is the determined cDNA sequence for clone | ‘70973.1’ |
| SEQ ID NO: 1751 | is the determined cDNA sequence for clone | ‘70974.1’ |
| SEQ ID NO: 1752 | is the determined cDNA sequence for clone | ‘70975.1’ |
| SEQ ID NO: 1753 | is the determined cDNA sequence for clone | ‘70977.1’ |
| SEQ ID NO: 1754 | is the determined cDNA sequence for clone | ‘70980.1’ |
| SEQ ID NO: 1755 | is the determined cDNA sequence for clone | ‘70981.1’ |
| SEQ ID NO: 1756 | is the determined cDNA sequence for clone | ‘70982.1’ |
| SEQ ID NO: 1757 | is the determined cDNA sequence for clone | ‘70986.1’ |
| SEQ ID NO: 1758 | is the determined cDNA sequence for clone | ‘70987.1’ |
| SEQ ID NO: 1759 | is the determined cDNA sequence for clone | ‘70988.1’ |
| SEQ ID NO: 1760 | is the determined cDNA sequence for clone | ‘70997.1’ |
| SEQ ID NO: 1761 | is the determined cDNA sequence for clone | ‘70998.1’ |
| SEQ ID NO: 1762 | is the determined cDNA sequence for clone | ‘70999.1’ |
| SEQ ID NO: 1763 | is the determined cDNA sequence for clone | ‘71006.1’ |
| SEQ ID NO: 1764 | is the determined cDNA sequence for clone | ‘71008.1’ |
| SEQ ID NO: 1765 | is the determined cDNA sequence for clone | ‘71009.1’ |
| SEQ ID NO: 1766 | is the determined cDNA sequence for clone | ‘71011.1’ |
| SEQ ID NO: 1767 | is the determined cDNA sequence for clone | ‘71012.1’ |
| SEQ ID NO: 1768 | is the determined cDNA sequence for clone | ‘71018.1’ |
| SEQ ID NO: 1769 | is the determined cDNA sequence for clone | ‘71021.1’ |
| SEQ ID NO: 1770 | is the determined cDNA sequence for clone | ‘71022.1’ |
| SEQ ID NO: 1771 | is the determined cDNA sequence for clone | ‘71024.1’ |
| SEQ ID NO: 1772 | is the determined cDNA sequence for clone | ‘71028.1’ |
| SEQ ID NO: 1773 | is the determined cDNA sequence for clone | ‘71029.1’ |
| SEQ ID NO: 1774 | is the determined cDNA sequence for clone | ‘71032.1’ |
| SEQ ID NO: 1775 | is the determined cDNA sequence for clone | ‘71036.1’ |
| SEQ ID NO: 1776 | is the determined cDNA sequence for clone | ‘71037.1’ |
| SEQ ID NO: 1777 | is the determined cDNA sequence for clone | ‘71039.1’ |
| SEQ ID NO: 1778 | is the determined cDNA sequence for clone | ‘71045.1’ |
| SEQ ID NO: 1779 | is the determined cDNA sequence for clone | ‘71049.1’ |
| SEQ ID NO: 1780 | is the determined cDNA sequence for clone | ‘71051.1’ |
| SEQ ID NO: 1781 | is the determined cDNA sequence for clone | ‘71055.1’ |
| SEQ ID NO: 1782 | is the determined cDNA sequence for clone | ‘71058.1’ |
| SEQ ID NO: 1783 | is the determined cDNA sequence for clone | ‘71059.1’ |
| SEQ ID NO: 1784 | is the determined cDNA sequence for clone | ‘71062.1’ |
| SEQ ID NO: 1785 | is the determined cDNA sequence for clone | ‘71063.1’ |
| SEQ ID NO: 1786 | is the determined cDNA sequence for clone | ‘71065.1’ |
| SEQ ID NO: 1787 | is the determined cDNA sequence for clone | ‘71066.1’ |
| SEQ ID NO: 1788 | is the determined cDNA sequence for clone | 602287 Human E1A |
| | | enhancer binding protein |
| | | (EIA-F) |
| SEQ ID NO: 1789 | is the predicted amino acid sequence for | SEQ ID NO: 1788, |
| | | Human E1A enhancer |
| | | binding protein (EIA-F) |

### DETAILED DESCRIPTION OF THE INVENTION

[0042] The present invention is directed generally to compositions and their use in the therapy and diagnosis of cancer, particularly colon cancer. As described further below, illustrative compositions of the present invention include, but are not restricted to, polypeptides, particularly immunogenic polypeptides, polynucleotides encoding such polypeptides, antibodies and other binding agents, antigen presenting cells (APCs) and immune system cells (e.g., T cells).

[0043] The practice of the present invention will employ, unless indicated specifically to the contrary, conventional methods of virology, immunology, microbiology, molecular biology and recombinant DNA techniques within the skill of the art, many of which are described below for the purpose of illustration. Such techniques are explained fully in the literature. See, e.g., Sambrook, et al. Molecular Cloning: A Laboratory Manual (2nd Edition, 1989); Maniatis et al. Molecular Cloning: A Laboratory Manual (1982); DNA Cloning: A Practical Approach, vol. I & II (D. Glover, ed.); Oligonucleotide Synthesis (N. Gait, ed., 1984); Nucleic Acid Hybridization (B. Hames & S. Higgins, eds., 1985); Transcription and Translation (B. Hames & S. Higgins, eds., 1984); Animal Cell Culture (R. Freshney, ed., 1986); Perbal, A Practical Guide to Molecular Cloning (1984).

[0044] All publications, patents and patent applications cited herein, whether supra or infra, are hereby incorporated by reference in their entirety.

[0045] As used in this specification and the appended claims, the singular forms “a,” “an ” and “the” include plural references unless the content clearly dictates otherwise.

[0046] Polypeptide Compositions

[0047] As used herein, the term “polypeptide” is used in its conventional meaning, i.e., as a sequence of amino acids. The polypeptides are not limited to a specific length of the product; thus, peptides, oligopeptides, and proteins are included within the definition of polypeptide, and such terms may be used interchangeably herein unless specifically indicated otherwise. This term also does not refer to or exclude post expression modifications of the polypeptide, for example, glycosylations, acetylations, phosphorylations and the like, as well as other modifications known in the art, both naturally occurring and non-naturally occurring. A polypeptide may be an entire protein, or a subsequence thereof. Particular polypeptides of interest in the context of this invention are amino acid subsequences comprising epitopes, i.e., antigenic determinants substantially responsible for the immunogenic properties of a polypeptide and being capable of evoking an immune response.

[0048] Particularly illustrative polypeptides of the present invention comprise those encoded by a polynucleotide sequence set forth in any one of SEQ ID NO:1-1788, or a sequence that hybridizes under moderately stringent conditions, or, alternatively, under highly stringent conditions, to a polynucleotide sequence set forth in any one of SEQ ID NO:1-1788. Certain other illustrative polypeptides of the invention comprise amino acid sequences as set forth in any one of SEQ ID NO:1789.

[0049] The polypeptides of the present invention are sometimes herein referred to as colon tumor proteins or colon tumor polypeptides, as an indication that their identification has been based at least in part upon their increased levels of expression in colon tumor samples. Thus, a “colon tumor polypeptide” or “colon tumor protein,” refers generally to a polypeptide sequence of the present invention, or a polynucleotide sequence encoding such a polypeptide, that is expressed in a substantial proportion of colon tumor samples, for example preferably greater than about 20%, more preferably greater than about 30%, and most preferably greater than about 50% or more of colon tumor samples tested, at a level that is at least two fold, and preferably at least five fold, greater than the level of expression in normal tissues, as determined using a representative assay provided herein. A colon tumor polypeptide sequence of the invention, based upon its increased level of expression in tumor cells, has particular utility both as a diagnostic marker as well as a therapeutic target, as further described below.

[0050] In certain preferred embodiments, the polypeptides of the invention are immunogenic, i.e., they react detectably within an immunoassay (such as an ELISA or T-cell stimulation assay) with antisera and/or T-cells from a patient with colon cancer. Screening for immunogenic activity can be performed using techniques well known to the skilled artisan. For example, such screens can be performed using methods such as those described in Harlow and Lane, Antibodies: A Laboratory Manual, Cold Spring Harbor Laboratory, 1988. In one illustrative example, a polypeptide may be immobilized on a solid support and contacted with patient sera to allow binding of antibodies within the sera to the immobilized polypeptide. Unbound sera may then be removed and bound antibodies detected using, for example, ¹²⁵I-labeled Protein A.

[0051] As would be recognized by the skilled artisan, immunogenic portions of the polypeptides disclosed herein are also encompassed by the present invention. An “immunogenic portion,” as used herein, is a fragment of an immunogenic polypeptide of the invention that itself is immunologically reactive (i.e., specifically binds) with the B-cells and/or T-cell surface antigen receptors that recognize the polypeptide. Immunogenic portions may generally be identified using well known techniques, such as those summarized in Paul, Fundamental Immunology, 3rd ed., 243-247 (Raven Press, 1993) and references cited therein. Such techniques include screening polypeptides for the ability to react with antigen-specific antibodies, antisera and/or T-cell lines or clones. As used herein, antisera and antibodies are “antigen-specific” if they specifically bind to an antigen (i.e., they react with the protein in an ELISA or other immunoassay, and do not react detectably with unrelated proteins). Such antisera and antibodies may be prepared as described herein, and using well-known techniques.

[0052] In one preferred embodiment, an immunogenic portion of a polypeptide of the present invention is a portion that reacts with antisera and/or T-cells at a level that is not substantially less than the reactivity of the full-length polypeptide (e.g., in an ELISA and/or T-cell reactivity assay). Preferably, the level of immunogenic activity of the immunogenic portion is at least about 50%, preferably at least about 70% and most preferably greater than about 90% of the immunogenicity for the full-length polypeptide. In some instances, preferred immunogenic portions will be identified that have a level of immunogenic activity greater than that of the corresponding full-length polypeptide, e.g., having greater than about 100% or 150% or more immunogenic activity.

[0053] In certain other embodiments, illustrative immunogenic portions may include peptides in which an N-terminal leader sequence and/or transmembrane domain have been deleted. Other illustrative immunogenic portions will contain a small N- and/or C-terminal deletion (e.g., 1-30 amino acids, preferably 5-15 amino acids), relative to the mature protein.

[0054] In another embodiment, a polypeptide composition of the invention may also comprise one or more polypeptides that are immunologically reactive with T cells and/or antibodies generated against a polypeptide of the invention, particularly a polypeptide having an amino acid sequence disclosed herein, or to an immunogenic fragment or variant thereof.

[0055] In another embodiment of the invention, polypeptides are provided that comprise one or more polypeptides that are capable of eliciting T cells and/or antibodies that are immunologically reactive with one or more polypeptides described herein, or one or more polypeptides encoded by contiguous nucleic acid sequences contained in the polynucleotide sequences disclosed herein, or immunogenic fragments or variants thereof, or to one or more nucleic acid sequences which hybridize to one or more of these sequences under conditions of moderate to high stringency.

[0056] The present invention, in another aspect, provides polypeptide fragments comprising at least about 5, 10, 15, 20, 25, 50, or 100 contiguous amino acids, or more, including all intermediate lengths, of a polypeptide compositions set forth herein, such as those set forth in SEQ ID NO:1789, or those encoded by a polynucleotide sequence set forth in a sequence of SEQ ID NO:1-1788.

[0057] In another aspect, the present invention provides variants of the polypeptide compositions described herein. Polypeptide variants generally encompassed by the present invention will typically exhibit at least about 70%, 75%, 80%, 85%, 90%, 91%, 92%, 93%, 94%, 95%, 96%, 97%, 98%, or 99% or more identity (determined as described below), along its length, to a polypeptide sequences set forth herein.

[0058] In one preferred embodiment, the polypeptide fragments and variants provided by the present invention are immunologically reactive with an antibody and/or T-cell that reacts with a full-length polypeptide specifically set forth herein.

[0059] In another preferred embodiment, the polypeptide fragments and variants provided by the present invention exhibit a level of immunogenic activity of at least about 50%, preferably at least about 70%, and most preferably at least about 90% or more of that exhibited by a full-length polypeptide sequence specifically set forth herein.

[0060] A polypeptide “variant,” as the term is used herein, is a polypeptide that typically differs from a polypeptide specifically disclosed herein in one or more substitutions, deletions, additions and/or insertions. Such variants may be naturally occurring or may be synthetically generated, for example, by modifying one or more of the above polypeptide sequences of the invention and evaluating their immunogenic activity as described herein and/or using any of a number of techniques well known in the art.

[0061] For example, certain illustrative variants of the polypeptides of the invention include those in which one or more portions, such as an N-terminal leader sequence or transmembrane domain, have been removed. Other illustrative variants include variants in which a small portion (e.g., 1-30 amino acids, preferably 5-15 amino acids) has been removed from the N- and/or C-terminal of the mature protein.

[0062] In many instances, a variant will contain conservative substitutions. A “conservative substitution” is one in which an amino acid is substituted for another amino acid that has similar properties, such that one skilled in the art of peptide chemistry would expect the secondary structure and hydropathic nature of the polypeptide to be substantially unchanged. As described above, modifications may be made in the structure of the polynucleotides and polypeptides of the present invention and still obtain a functional molecule that encodes a variant or derivative polypeptide with desirable characteristics, e.g., with immunogenic characteristics. When it is desired to alter the amino acid sequence of a polypeptide to create an equivalent, or even an improved, immunogenic variant or portion of a polypeptide of the invention, one skilled in the art will typically change one or more of the codons of the encoding DNA sequence according to Table 1.

[0063] For example, certain amino acids may be substituted for other amino acids in a protein structure without appreciable loss of interactive binding capacity with structures such as, for example, antigen-binding regions of antibodies or binding sites on substrate molecules. Since it is the interactive capacity and nature of a protein that defines that protein's biological functional activity, certain amino acid sequence substitutions can be made in a protein sequence, and, of course, its underlying DNA coding sequence, and nevertheless obtain a protein with like properties. It is thus contemplated that various changes may be made in the peptide sequences of the disclosed compositions, or corresponding DNA sequences which encode said peptides without appreciable loss of their biological utility or activity.

TABLE 1

| Amino Acids | | | Codons |
|---|---|---|---|
| Alanine | Ala | A | GCA GCC GCG GCU |
| Cysteine | Cys | C | UGC UGU |
| Aspartic acid | Asp | D | GAC GAU |
| Glutamic acid | Glu | E | GAA GAG |
| Phenylalanine | Phe | F | UUC UUU |
| Glycine | Gly | G | GGA GGC GGG GGU |
| Histidine | His | H | CAC CAU |
| Isoleucine | Ile | I | AUA AUC AUU |
| Lysine | Lys | K | AAA AAG |
| Leucine | Leu | L | UUA UUG CUA CUC CUG CUU |
| Methionine | Met | M | AUG |
| Asparagine | Asn | N | AAC AAU |
| Proline | Pro | P | CCA CCC CCG CCU |
| Glutamine | Gln | Q | CAA CAG |
| Arginine | Arg | R | AGA AGG CGA CGC CGG CGU |
| Serine | Ser | S | AGC AGU UCA UCC UCG UCU |
| Threonine | Thr | T | ACA ACC ACG ACU |
| Valine | Val | V | GUA GUC GUG GUU |
| Tryptophan | Trp | W | UGG |
| Tyrosine | Tyr | Y | UAC UAU |

[0064] In making such changes, the hydropathic index of amino acids may be considered. The importance of the hydropathic amino acid index in conferring interactive biologic function on a protein is generally understood in the art (Kyte and Doolittle, 1982, incorporated herein by reference). It is accepted that the relative hydropathic character of the amino acid contributes to the secondary structure of the resultant protein, which in turn defines the interaction of the protein with other molecules, for example, enzymes, substrates, receptors, DNA, antibodies, antigens, and the like. Each amino acid has been assigned a hydropathic index on the basis of its hydrophobicity and charge characteristics (Kyte and Doolittle, 1982). These values are: isoleucine (+4.5); valine (+4.2); leucine (+3.8); phenylalanine (+2.8); cysteine/cystine (+2.5); methionine (+1.9); alanine (+1.8); glycine (−0.4); threonine (−0.7); serine (−0.8); tryptophan (−0.9); tyrosine (−1.3); proline (−1.6); histidine (−3.2); glutamate (−3.5); glutamine (−3.5); aspartate (−3.5); asparagine (−3.5); lysine (−3.9); and arginine (−4.5).

[0065] It is known in the art that certain amino acids may be substituted by other amino acids having a similar hydropathic index or score and still result in a protein with similar biological activity, i.e. still obtain a biological functionally equivalent protein. In making such changes, the substitution of amino acids whose hydropathic indices are within ±2 is preferred, those within ±1 are particularly preferred, and those within ±0.5 are even more particularly preferred. It is also understood in the art that the substitution of like amino acids can be made effectively on the basis of hydrophilicity. U.S. Pat. No. 4,554,101 (specifically incorporated herein by reference in its entirety), states that the greatest local average hydrophilicity of a protein, as governed by the hydrophilicity of its adjacent amino acids, correlates with a biological property of the protein.

[0066] As detailed in U.S. Pat. No. 4,554,101, the following hydrophilicity values have been assigned to amino acid residues: arginine (+3.0); lysine (+3.0); aspartate (+3.0±1); glutamate (+3.0±1); serine (+0.3); asparagine (+0.2); glutamine (+0.2); glycine (0); threonine (−0.4); proline (−0.5±1); alanine (−0.5); histidine (−0.5); cysteine (−1.0); methionine (−1.3); valine (−1.5); leucine (−1.8); isoleucine (−1.8); tyrosine (−2.3); phenylalanine (−2.5); tryptophan (−3.4). It is understood that an amino acid can be substituted for another having a similar hydrophilicity value and still obtain a biologically equivalent, and in particular, an immunologically equivalent protein. In such changes, the substitution of amino acids whose hydrophilicity values are within ±2 is preferred, those within ±1 are particularly preferred, and those within ±0.5 are even more particularly preferred.

[0067] As outlined above, amino acid substitutions are generally therefore based on the relative similarity of the amino acid side-chain substituents, for example, their hydrophobicity, hydrophilicity, charge, size, and the like. Exemplary substitutions that take various of the foregoing characteristics into consideration are well known to those of skill in the art and include: arginine and lysine; glutamate and aspartate; serine and threonine; glutamine and asparagine; and valine, leucine and isoleucine.

[0068] In addition, any polynucleotide may be further modified to increase stability in vivo. Possible modifications include, but are not limited to, the addition of flanking sequences at the 5′ and/or 3′ ends; the use of phosphorothioate or 2′ O-methyl rather than phosphodiesterase linkages in the backbone; and/or the inclusion of nontraditional bases such as inosine, queosine and wybutosine, as well as acetyl- methyl-, thio- and other modified forms of adenine, cytidine, guanine, thymine and uridine.

[0069] Amino acid substitutions may further be made on the basis of similarity in polarity, charge, solubility, hydrophobicity, hydrophilicity and/or the amphipathic nature of the residues. For example, negatively charged amino acids include aspartic acid and glutamic acid; positively charged amino acids include lysine and arginine; and amino acids with uncharged polar head groups having similar hydrophilicity values include leucine, isoleucine and valine; glycine and alanine; asparagine and glutamine; and serine, threonine, phenylalanine and tyrosine. Other groups of amino acids that may represent conservative changes include: (1) ala, pro, gly, glu, asp, gln, asn, ser, thr; (2) cys, ser, tyr, thr; (3) val, ile, leu, met, ala, phe; (4) lys, arg, his; and (5) phe, tyr, trp, his. A variant may also, or alternatively, contain nonconservative changes. In a preferred embodiment, variant polypeptides differ from a native sequence by substitution, deletion or addition of five amino acids or fewer. Variants may also (or alternatively) be modified by, for example, the deletion or addition of amino acids that have minimal influence on the immunogenicity, secondary structure and hydropathic nature of the polypeptide.

[0070] As noted above, polypeptides may comprise a signal (or leader) sequence at the N-terminal end of the protein, which co-translationally or post-translationally directs transfer of the protein. The polypeptide may also be conjugated to a linker or other sequence for ease of synthesis, purification or identification of the polypeptide (e.g. poly-His), or to enhance binding of the polypeptide to a solid support. For example, a polypeptide may be conjugated to an immunoglobulin Fc region.

[0071] When comparing polypeptide sequences, two sequences are said to be “identical” if the sequence of amino acids in the two sequences is the same when aligned for maximum correspondence, as described below. Comparisons between two sequences are typically performed by comparing the sequences over a comparison window to identify and compare local regions of sequence similarity. A “comparison window” as used herein, refers to a segment of at least about 20 contiguous positions, usually 30 to about 75, 40 to about 50, in which a sequence may be compared to a reference sequence of the same number of contiguous positions after the two sequences are optimally aligned.

[0072] Optimal alignment of sequences for comparison may be conducted using the Megalign program in the Lasergene suite of bioinformatics software (DNASTAR, Inc., Madison, Wis.), using default parameters. This program embodies several alignment schemes described in the following references: Dayhoff, M. O. (1978) A model of evolutionary change in proteins—Matrices for detecting distant relationships. In Dayhoff, M. O. (ed.) Atlas of Protein Sequence and Structure, National Biomedical Research Foundation, Washington D.C. Vol. 5, Suppl. 3, pp. 345-358; Hein J. (1990) Unified Approach to Alignment and Phylogenes pp. 626-645 Methods in Enzymology vol. 183, Academic Press, Inc., San Diego, Calif.; Higgins, D. G. and Sharp, P. M. (1989) CABIOS 5:151-153; Myers, E. W. and Muller W. (1988) CABIOS 4:11-17; Robinson, E. D. (1971) Comb. Theor 11:105; Saitou, N. Nei, M. (1987) Mol. Biol. Evol. 4:406-425; Sneath, P. H. A. and Sokal, R. R. (1973) Numerical Taxonomy—the Principles and Practice of Numerical Taxonomy, Freeman Press, San Francisco, Calif.; Wilbur, W. J. and Lipman, D. J. (1983) Proc. Natl. Acad., Sci. USA 80:726-730.

[0073] Alternatively, optimal alignment of sequences for comparison may be conducted by the local identity algorithm of Smith and Waterman (1981) Add. APL. Math 2:482, by the identity alignment algorithm of Needleman and Wunsch (1970) J. Mol. Biol. 48:443, by the search for similarity methods of Pearson and Lipman (1988) Proc. Natl. Acad. Sci. USA 85: 2444, by computerized implementations of these algorithms (GAP, BESTFIT, BLAST, FASTA, and TFASTA in the Wisconsin Genetics Software Package, Genetics Computer Group (GCG), 575 Science Dr., Madison, Wis.), or by inspection.

[0074] One preferred example of algorithms that are suitable for determining percent sequence identity and sequence similarity are the BLAST and BLAST 2.0 algorithms, which are described in Altschul et al. (1977) Nucl. Acids Res. 25:3389-3402 and Altschul et al. (1990) J. Mol. Biol. 215:403-410, respectively. BLAST and BLAST 2.0 can be used, for example with the parameters described herein, to determine percent sequence identity for the polynucleotides and polypeptides of the invention. Software for performing BLAST analyses is publicly available through the National Center for Biotechnology Information. For amino acid sequences, a scoring matrix can be used to calculate the cumulative score. Extension of the word hits in each direction are halted when: the cumulative alignment score falls off by the quantity X from its maximum achieved value; the cumulative score goes to zero or below, due to the accumulation of one or more negative-scoring residue alignments; or the end of either sequence is reached. The BLAST algorithm parameters W, T and X determine the sensitivity and speed of the alignment.

[0075] In one preferred approach, the “percentage of sequence identity” is determined by comparing two optimally aligned sequences over a window of comparison of at least 20 positions, wherein the portion of the polypeptide sequence in the comparison window may comprise additions or deletions (i.e., gaps) of 20 percent or less, usually 5 to 15 percent, or 10 to 12 percent, as compared to the reference sequences (which does not comprise additions or deletions) for optimal alignment of the two sequences. The percentage is calculated by determining the number of positions at which the identical amino acid residue occurs in both sequences to yield the number of matched positions, dividing the number of matched positions by the total number of positions in the reference sequence (i.e., the window size) and multiplying the results by 100 to yield the percentage of sequence identity.

[0076] Within other illustrative embodiments, a polypeptide may be a xenogeneic polypeptide that comprises an polypeptide having substantial sequence identity, as described above, to the human polypeptide (also termed autologous antigen) which served as a reference polypeptide, but which xenogeneic polypeptide is derived from a different, non-human species. One skilled in the art will recognize that “self” antigens are often poor stimulators of CD8+ and CD4+ T-lymphocyte responses, and therefore efficient immunotherapeutic strategies directed against tumor polypeptides require the development of methods to overcome immune tolerance to particular self tumor polypeptides. For example, humans immunized with prostase protein from a xenogeneic (non human) origin are capable of mounting an immune response against the counterpart human protein, e.g. the human prostase tumor protein present on human tumor cells. Accordingly, the present invention provides methods for purifying the xenogeneic form of the tumor proteins set forth herein, such as the polypeptide set forth in SEQ ID NO:1789, or those encoded by polynucleotide sequences set forth in SEQ ID NO:1-1788.

[0077] Therefore, one aspect of the present invention provides xenogeneic variants of the polypeptide compositions described herein. Such xenogeneic variants generally encompassed by the present invention will typically exhibit at least about 70%, 75%, 80%, 85%, 90%, 91%, 92%, 93%, 94%, 95%, 96%, 97%, 98%, or 99% or more identity along their lengths, to a polypeptide sequences set forth herein.

[0078] More particularly, the invention is directed to mouse, rat, monkey, porcine and other non-human polypeptides which can be used as xenogeneic forms of human polypeptides set forth herein, to induce immune responses directed against tumor polypeptides of the invention.

[0079] Within other illustrative embodiments, a polypeptide may be a fusion polypeptide that comprises multiple polypeptides as described herein, or that comprises at least one polypeptide as described herein and an unrelated sequence, such as a known tumor protein. A fusion partner may, for example, assist in providing T helper epitopes (an immunological fusion partner), preferably T helper epitopes recognized by humans, or may assist in expressing the protein (an expression enhancer) at higher yields than the native recombinant protein. Certain preferred fusion partners are both immunological and expression enhancing fusion partners. Other fusion partners may be selected so as to increase the solubility of the polypeptide or to enable the polypeptide to be targeted to desired intracellular compartments. Still further fusion partners include affinity tags, which facilitate purification of the polypeptide.

[0080] Fusion polypeptides may generally be prepared using standard techniques, including chemical conjugation. Preferably, a fusion polypeptide is expressed as a recombinant polypeptide, allowing the production of increased levels, relative to a non-fused polypeptide, in an expression system. Briefly, DNA sequences encoding the polypeptide components may be assembled separately, and ligated into an appropriate expression vector. The 3′ end of the DNA sequence encoding one polypeptide component is ligated, with or without a peptide linker, to the 5′ end of a DNA sequence encoding the second polypeptide component so that the reading frames of the sequences are in phase. This permits translation into a single fusion polypeptide that retains the biological activity of both component polypeptides.

[0081] A peptide linker sequence may be employed to separate the first and second polypeptide components by a distance sufficient to ensure that each polypeptide folds into its secondary and tertiary structures. Such a peptide linker sequence is incorporated into the fusion polypeptide using standard techniques well known in the art. Suitable peptide linker sequences may be chosen based on the following factors: (1) their ability to adopt a flexible extended conformation; (2) their inability to adopt a secondary structure that could interact with functional epitopes on the first and second polypeptides; and (3) the lack of hydrophobic or charged residues that might react with the polypeptide functional epitopes. Preferred peptide linker sequences contain Gly, Asn and Ser residues. Other near neutral amino acids, such as Thr and Ala may also be used in the linker sequence. Amino acid sequences which may be usefully employed as linkers include those disclosed in Maratea et al., Gene 40:39-46, 1985; Murphy et al., Proc. Natl. Acad. Sci. USA 83:8258-8262, 1986; U.S. Pat. Nos. 4,935,233 and 4,751,180. The linker sequence may generally be from 1 to about 50 amino acids in length. Linker sequences are not required when the first and second polypeptides have non-essential N-terminal amino acid regions that can be used to separate the functional domains and prevent steric interference.

[0082] The ligated DNA sequences are operably linked to suitable transcriptional or translational regulatory elements. The regulatory elements responsible for expression of DNA are located only 5′ to the DNA sequence encoding the first polypeptides. Similarly, stop codons required to end translation and transcription termination signals are only present 3′ to the DNA sequence encoding the second polypeptide.

[0083] The fusion polypeptide can comprise a polypeptide as described herein together with an unrelated immunogenic protein, such as an immunogenic protein capable of eliciting a recall response. Examples of such proteins include tetanus, tuberculosis and hepatitis proteins (see, for example, Stoute et al. New Engl. J. Med., 336:86-91, 1997).

[0084] In one preferred embodiment, the immunological fusion partner is derived from a Mycobacterium sp., such as a Mycobacterium tuberculosis-derived Ra12 fragment. Ra12 compositions and methods for their use in enhancing the expression and/or immunogenicity of heterologous polynucleotide/polypeptide sequences is described in U.S. patent application Ser. No. 60/158,585, the disclosure of which is incorporated herein by reference in its entirety. Briefly, Ra12 refers to a polynucleotide region that is a subsequence of a Mycobacterium tuberculosis MTB32A nucleic acid. MTB32A is a serine protease of 32 KD molecular weight encoded by a gene in virulent and avirulent strains of M. tuberculosis. The nucleotide sequence and amino acid sequence of MTB32A have been described (for example, U.S. patent application Ser. No. 60/158,585; see also, Skeiky et al., Infection and Immun. (1999) 67:3998-4007, incorporated herein by reference). C-terminal fragments of the MTB32A coding sequence express at high levels and remain as a soluble polypeptides throughout the purification process. Moreover, Ra12 may enhance the immunogenicity of heterologous immunogenic polypeptides with which it is fused. One preferred Ra12 fusion polypeptide comprises a 14 KD C-terminal fragment corresponding to amino acid residues 192 to 323 of MTB32A. Other preferred Ra12 polynucleotides generally comprise at least about 15 consecutive nucleotides, at least about 30 nucleotides, at least about 60 nucleotides, at least about 100 nucleotides, at least about 200 nucleotides, or at least about 300 nucleotides that encode a portion of a Ra12 polypeptide. Ra12 polynucleotides may comprise a native sequence (i.e., an endogenous sequence that encodes a Ra12 polypeptide or a portion thereof) or may comprise a variant of such a sequence. Ra12 polynucleotide variants may contain one or more substitutions, additions, deletions and/or insertions such that the biological activity of the encoded fusion polypeptide is not substantially diminished, relative to a fusion polypeptide comprising a native Ra12 polypeptide. Variants preferably exhibit at least about 70% identity, more preferably at least about 80% identity and most preferably at least about 90% identity to a polynucleotide sequence that encodes a native Ra12 polypeptide or a portion thereof.

[0085] Within other preferred embodiments, an immunological fusion partner is derived from protein D, a surface protein of the gram-negative bacterium Haemophilus influenza B (WO 91/18926). Preferably, a protein D derivative comprises approximately the first third of the protein (e.g., the first N-terminal 100-110 amino acids), and a protein D derivative may be lipidated. Within certain preferred embodiments, the first 109 residues of a Lipoprotein D fusion partner is included on the N-terminus to provide the polypeptide with additional exogenous T-cell epitopes and to increase the expression level in E. coli (thus functioning as an expression enhancer). The lipid tail ensures optimal presentation of the antigen to antigen presenting cells. Other fusion partners include the non-structural protein from influenzae virus, NS1 (hemaglutinin). Typically, the N-terminal 81 amino acids are used, although different fragments that include T-helper epitopes may be used.

[0086] In another embodiment, the immunological fusion partner is the protein known as LYTA, or a portion thereof (preferably a C-terminal portion). LYTA is derived from Streptococcus pneumoniae, which synthesizes an N-acetyl-L-alanine amidase known as amidase LYTA (encoded by the LytA gene; Gene 43:265-292, 1986). LYTA is an autolysin that specifically degrades certain bonds in the peptidoglycan backbone. The C-terminal domain of the LYTA protein is responsible for the affinity to the choline or to some choline analogues such as DEAE. This property has been exploited for the development of E. coli C-LYTA expressing plasmids useful for expression of fusion proteins. Purification of hybrid proteins containing the C-LYTA fragment at the amino terminus has been described (see Biotechnology 10:795-798, 1992). Within a preferred embodiment, a repeat portion of LYTA may be incorporated into a fusion polypeptide. A repeat portion is found in the C-terminal region starting at residue 178. A particularly preferred repeat portion incorporates residues 188-305.

[0087] Yet another illustrative embodiment involves fusion polypeptides, and the polynucleotides encoding them, wherein the fusion partner comprises a targeting signal capable of directing a polypeptide to the endosomal/lysosomal compartment, as described in U.S. Pat. No. 5,633,234. An immunogenic polypeptide of the invention, when fused with this targeting signal, will associate more efficiently with MHC class II molecules and thereby provide enhanced in vivo stimulation of CD4⁺ T-cells specific for the polypeptide.

[0088] Polypeptides of the invention are prepared using any of a variety of well known synthetic and/or recombinant techniques, the latter of which are further described below. Polypeptides, portions and other variants generally less than about 150 amino acids can be generated by synthetic means, using techniques well known to those of ordinary skill in the art. In one illustrative example, such polypeptides are synthesized using any of the commercially available solid-phase techniques, such as the Merrifield solid-phase synthesis method, where amino acids are sequentially added to a growing amino acid chain. See Merrifield, J. Am. Chem. Soc. 85:2149-2146, 1963. Equipment for automated synthesis of polypeptides is commercially available from suppliers such as Perkin Elmer/Applied BioSystems Division (Foster City, Calif.), and may be operated according to the manufacturer's instructions.

[0089] In general, polypeptide compositions (including fusion polypeptides) of the invention are isolated. An “isolated” polypeptide is one that is removed from its original environment. For example, a naturally-occurring protein or polypeptide is isolated if it is separated from some or all of the coexisting materials in the natural system. Preferably, such polypeptides are also purified, e.g., are at least about 90% pure, more preferably at least about 95% pure and most preferably at least about 99% pure.

[0090] Polynucleotide Compositions

[0091] The present invention, in other aspects, provides polynucleotide compositions. The terms “DNA” and “polynucleotide” are used essentially interchangeably herein to refer to a DNA molecule that has been isolated free of total genomic DNA of a particular species. “Isolated,” as used herein, means that a polynucleotide is substantially away from other coding sequences, and that the DNA molecule does not contain large portions of unrelated coding DNA, such as large chromosomal fragments or other functional genes or polypeptide coding regions. Of course, this refers to the DNA molecule as originally isolated, and does not exclude genes or coding regions later added to the segment by the hand of man.

[0092] As will be understood by those skilled in the art, the polynucleotide compositions of this invention can include genomic sequences, extra-genomic and plasmid-encoded sequences and smaller engineered gene segments that express, or may be adapted to express, proteins, polypeptides, peptides and the like. Such segments may be naturally isolated, or modified synthetically by the hand of man.

[0093] As will be also recognized by the skilled artisan, polynucleotides of the invention may be single-stranded (coding or antisense) or double-stranded, and may be DNA (genomic, cDNA or synthetic) or RNA molecules. RNA molecules may include HnRNA molecules, which contain introns and correspond to a DNA molecule in a one-to-one manner, and mRNA molecules, which do not contain introns. Additional coding or non-coding sequences may, but need not, be present within a polynucleotide of the present invention, and a polynucleotide may, but need not, be linked to other molecules and/or support materials.

[0094] Polynucleotides may comprise a native sequence (i.e., an endogenous sequence that encodes a polypeptide/protein of the invention or a portion thereof) or may comprise a sequence that encodes a variant or derivative, preferably and immunogenic variant or derivative, of such a sequence.

[0095] Therefore, according to another aspect of the present invention, polynucleotide compositions are provided that comprise some or all of a polynucleotide sequence set forth in any one of SEQ ID NO:1-1788, complements of a polynucleotide sequence set forth in any one of SEQ ID NO:1-1788, and degenerate variants of a polynucleotide sequence set forth in any one of SEQ ID NO:1-1788. In certain preferred embodiments, the polynucleotide sequences set forth herein encode immunogenic polypeptides, as described above.

[0096] In other related embodiments, the present invention provides polynucleotide variants having substantial identity to the sequences disclosed herein in SEQ ID NO:1-1788, for example those comprising at least 70% sequence identity, preferably at least 75%, 80%, 85%, 90%, 95%, 96%, 97%, 98%, or 99% or higher, sequence identity compared to a polynucleotide sequence of this invention using the methods described herein, (e.g., BLAST analysis using standard parameters, as described below). One skilled in this art will recognize that these values can be appropriately adjusted to determine corresponding identity of proteins encoded by two nucleotide sequences by taking into account codon degeneracy, amino acid similarity, reading frame positioning and the like.

[0097] Typically, polynucleotide variants will contain one or more substitutions, additions, deletions and/or insertions, preferably such that the immunogenicity of the polypeptide encoded by the variant polynucleotide is not substantially diminished relative to a polypeptide encoded by a polynucleotide sequence specifically set forth herein). The term “variants” should also be understood to encompasses homologous genes of xenogenic origin.

[0098] In additional embodiments, the present invention provides polynucleotide fragments comprising or consisting of various lengths of contiguous stretches of sequence identical to or complementary to one or more of the sequences disclosed herein. For example, polynucleotides are provided by this invention that comprise or consist of at least about 10, 15, 20, 30, 40, 50, 75, 100, 150, 200, 300, 400, 500 or 1000 or more contiguous nucleotides of one or more of the sequences disclosed herein as well as all intermediate lengths there between. It will be readily understood that “intermediate lengths”, in this context, means any length between the quoted values, such as 16, 17, 18, 19, etc.; 21, 22, 23, etc.; 30, 31, 32, etc.; 50, 51, 52, 53, etc.; 100, 101, 102, 103, etc.; 150, 151, 152, 153, etc.; including all integers through 200-500; 500-1,000, and the like. A polynucleotide sequence as described here may be extended at one or both ends by additional nucleotides not found in the native sequence. This additional sequence may consist of 1, 2, 3, 4, 5, 6, 7, 8, 9, 10, 11, 12, 13, 14, 15, 16, 17, 18, 19, or 20 nucleotides at either end of the disclosed sequence or at both ends of the disclosed sequence.

[0099] In another embodiment of the invention, polynucleotide compositions are provided that are capable of hybridizing under moderate to high stringency conditions to a polynucleotide sequence provided herein, or a fragment thereof, or a complementary sequence thereof. Hybridization techniques are well known in the art of molecular biology. For purposes of illustration, suitable moderately stringent conditions for testing the hybridization of a polynucleotide of this invention with other polynucleotides include prewashing in a solution of 5×SSC, 0.5% SDS, 1.0 mM EDTA (pH 8.0); hybridizing at 50° C.-60° C., 5×SSC, overnight; followed by washing twice at 65° C. for 20 minutes with each of 2×, 0.5× and 0.2×SSC containing 0.1% SDS. One skilled in the art will understand that the stringency of hybridization can be readily manipulated, such as by altering the salt content of the hybridization solution and/or the temperature at which the hybridization is performed. For example, in another embodiment, suitable highly stringent hybridization conditions include those described above, with the exception that the temperature of hybridization is increased, e.g., to 60-65° C. or 65-70° C.

[0100] In certain preferred embodiments, the polynucleotides described above, e.g., polynucleotide variants, fragments and hybridizing sequences, encode polypeptides that are immunologically cross-reactive with a polypeptide sequence specifically set forth herein. In other preferred embodiments, such polynucleotides encode polypeptides that have a level of immunogenic activity of at least about 50%, preferably at least about 70%, and more preferably at least about 90% of that for a polypeptide sequence specifically set forth herein.

[0101] The polynucleotides of the present invention, or fragments thereof, regardless of the length of the coding sequence itself, may be combined with other DNA sequences, such as promoters, polyadenylation signals, additional restriction enzyme sites, multiple cloning sites, other coding segments, and the like, such that their overall length may vary considerably. It is therefore contemplated that a nucleic acid fragment of almost any length may be employed, with the total length preferably being limited by the ease of preparation and use in the intended recombinant DNA protocol. For example, illustrative polynucleotide segments with total lengths of about 10,000, about 5000, about 3000, about 2,000, about 1,000, about 500, about 200, about 100, about 50 base pairs in length, and the like, (including all intermediate lengths) are contemplated to be useful in many implementations of this invention.

[0102] When comparing polynucleotide sequences, two sequences are said to be “identical” if the sequence of nucleotides in the two sequences is the same when aligned for maximum correspondence, as described below. Comparisons between two sequences are typically performed by comparing the sequences over a comparison window to identify and compare local regions of sequence similarity. A “comparison window” as used herein, refers to a segment of at least about 20 contiguous positions, usually 30 to about 75, 40 to about 50, in which a sequence may be compared to a reference sequence of the same number of contiguous positions after the two sequences are optimally aligned.

[0103] Optimal alignment of sequences for comparison may be conducted using the Megalign program in the Lasergene suite of bioinformatics software (DNASTAR, Inc., Madison, Wis.), using default parameters. This program embodies several alignment schemes described in the following references: Dayhoff, M. O. (1978) A model of evolutionary change in proteins—Matrices for detecting distant relationships. In Dayhoff, M. O. (ed.) Atlas of Protein Sequence and Structure, National Biomedical Research Foundation, Washington D.C. Vol. 5, Suppl. 3, pp. 345-358; Hein J. (1990) Unified Approach to Alignment and Phylogenes pp. 626-645 Methods in Enzymology vol. 183, Academic Press, Inc., San Diego, Calif.; Higgins, D. G. and Sharp, P. M. (1989) CABIOS 5:151-153; Myers, E. W. and Muller W. (1988) CABIOS 4:11-17; Robinson, E. D. (1971) Comb. Theor 11:105; Santou, N. Nes, M. (1987) Mol. Biol. Evol. 4:406-425; Sneath, P. H. A. and Sokal, R. R. (1973) Numerical Taxonomy—the Principles and Practice of Numerical Taxonomy, Freeman Press, San Francisco, Calif.; Wilbur, W. J. and Lipman, D. J. (1983) Proc. Natl. Acad., Sci. USA 80:726-730.

[0104] Alternatively, optimal alignment of sequences for comparison may be conducted by the local identity algorithm of Smith and Waterman (1981) Add. APL. Math 2:482, by the identity alignment algorithm of Needleman and Wunsch (1970) J. Mol. Biol. 48:443, by the search for similarity methods of Pearson and Lipman (1988) Proc. Natl. Acad. Sci. USA 85: 2444, by computerized implementations of these algorithms (GAP, BESTFIT, BLAST, FASTA, and TFASTA in the Wisconsin Genetics Software Package, Genetics Computer Group (GCG), 575 Science Dr., Madison, Wis.), or by inspection.

[0105] One preferred example of algorithms that are suitable for determining percent sequence identity and sequence similarity are the BLAST and BLAST 2.0 algorithms, which are described in Altschul et al. (1977) Nucl. Acids Res. 25:3389-3402 and Altschul et al. (1990) J. Mol. Biol. 215:403-410, respectively. BLAST and BLAST 2.0 can be used, for example with the parameters described herein, to determine percent sequence identity for the polynucleotides of the invention. Software for performing BLAST analyses is publicly available through the National Center for Biotechnology Information. In one illustrative example, cumulative scores can be calculated using, for nucleotide sequences, the parameters M (reward score for a pair of matching residues; always >0) and N (penalty score for mismatching residues; always <0). Extension of the word hits in each direction are halted when: the cumulative alignment score falls off by the quantity X from its maximum achieved value; the cumulative score goes to zero or below, due to the accumulation of one or more negative-scoring residue alignments; or the end of either sequence is reached. The BLAST algorithm parameters W, T and X determine the sensitivity and speed of the alignment. The BLASTN program (for nucleotide sequences) uses as defaults a wordlength (W) of 11, and expectation (E) of 10, and the BLOSUM62 scoring matrix (see Henikoff and Henikoff (1989) Proc. Natl. Acad. Sci. USA 89:10915) alignments, (B) of 50, expectation (E) of 10, M=5, N=−4 and a comparison of both strands.

[0106] Preferably, the “percentage of sequence identity” is determined by comparing two optimally aligned sequences over a window of comparison of at least 20 positions, wherein the portion of the polynucleotide sequence in the comparison window may comprise additions or deletions (i.e., gaps) of 20 percent or less, usually 5 to 15 percent, or 10 to 12 percent, as compared to the reference sequences (which does not comprise additions or deletions) for optimal alignment of the two sequences. The percentage is calculated by determining the number of positions at which the identical nucleic acid bases occurs in both sequences to yield the number of matched positions, dividing the number of matched positions by the total number of positions in the reference sequence (i.e., the window size) and multiplying the results by 100 to yield the percentage of sequence identity.

[0107] It will be appreciated by those of ordinary skill in the art that, as a result of the degeneracy of the genetic code, there are many nucleotide sequences that encode a polypeptide as described herein. Some of these polynucleotides bear minimal homology to the nucleotide sequence of any native gene. Nonetheless, polynucleotides that vary due to differences in codon usage are specifically contemplated by the present invention. Further, alleles of the genes comprising the polynucleotide sequences provided herein are within the scope of the present invention. Alleles are endogenous genes that are altered as a result of one or more mutations, such as deletions, additions and/or substitutions of nucleotides. The resulting mRNA and protein may, but need not, have an altered structure or function. Alleles may be identified using standard techniques (such as hybridization, amplification and/or database sequence comparison).

[0108] Therefore, in another embodiment of the invention, a mutagenesis approach, such as site-specific mutagenesis, is employed for the preparation of immunogenic variants and/or derivatives of the polypeptides described herein. By this approach, specific modifications in a polypeptide sequence can be made through mutagenesis of the underlying polynucleotides that encode them. These techniques provides a straightforward approach to prepare and test sequence variants, for example, incorporating one or more of the foregoing considerations, by introducing one or more nucleotide sequence changes into the polynucleotide.

[0109] Site-specific mutagenesis allows the production of mutants through the use of specific oligonucleotide sequences which encode the DNA sequence of the desired mutation, as well as a sufficient number of adjacent nucleotides, to provide a primer sequence of sufficient size and sequence complexity to form a stable duplex on both sides of the deletion junction being traversed. Mutations may be employed in a selected polynucleotide sequence to improve, alter, decrease, modify, or otherwise change the properties of the polynucleotide itself, and/or alter the properties, activity, composition, stability, or primary sequence of the encoded polypeptide.

[0110] In certain embodiments of the present invention, the inventors contemplate the mutagenesis of the disclosed polynucleotide sequences to alter one or more properties of the encoded polypeptide, such as the immunogenicity of a polypeptide vaccine. The techniques of site-specific mutagenesis are well-known in the art, and are widely used to create variants of both polypeptides and polynucleotides. For example, site-specific mutagenesis is often used to alter a specific portion of a DNA molecule. In such embodiments, a primer comprising typically about 14 to about 25 nucleotides or so in length is employed, with about 5 to about 10 residues on both sides of the junction of the sequence being altered.

[0111] As will be appreciated by those of skill in the art, site-specific mutagenesis techniques have often employed a phage vector that exists in both a single stranded and double stranded form. Typical vectors useful in site-directed mutagenesis include vectors such as the M13 phage. These phage are readily commercially-available and their use is generally well-known to those skilled in the art. Double-stranded plasmids are also routinely employed in site directed mutagenesis that eliminates the step of transferring the gene of interest from a plasmid to a phage.

[0112] In general, site-directed mutagenesis in accordance herewith is performed by first obtaining a single-stranded vector or melting apart of two strands of a double-stranded vector that includes within its sequence a DNA sequence that encodes the desired peptide. An oligonucleotide primer bearing the desired mutated sequence is prepared, generally synthetically. This primer is then annealed with the single-stranded vector, and subjected to DNA polymerizing enzymes such as E. coli polymerase I Klenow fragment, in order to complete the synthesis of the mutation-bearing strand. Thus, a heteroduplex is formed wherein one strand encodes the original non-mutated sequence and the second strand bears the desired mutation. This heteroduplex vector is then used to transform appropriate cells, such as E. coli cells, and clones are selected which include recombinant vectors bearing the mutated sequence arrangement.

[0113] The preparation of sequence variants of the selected peptide-encoding DNA segments using site-directed mutagenesis provides a means of producing potentially useful species and is not meant to be limiting as there are other ways in which sequence variants of peptides and the DNA sequences encoding them may be obtained. For example, recombinant vectors encoding the desired peptide sequence may be treated with mutagenic agents, such as hydroxylamine, to obtain sequence variants. Specific details regarding these methods and protocols are found in the teachings of Maloy et al., 1994; Segal, 1976; Prokop and Bajpai, 1991; Kuby, 1994; and Maniatis et al., 1982, each incorporated herein by reference, for that purpose.

[0114] As used herein, the term “oligonucleotide directed mutagenesis procedure” refers to template-dependent processes and vector-mediated propagation which result in an increase in the concentration of a specific nucleic acid molecule relative to its initial concentration, or in an increase in the concentration of a detectable signal, such as amplification. As used herein, the term “oligonucleotide directed mutagenesis procedure” is intended to refer to a process that involves the template-dependent extension of a primer molecule. The term template dependent process refers to nucleic acid synthesis of an RNA or a DNA molecule wherein the sequence of the newly synthesized strand of nucleic acid is dictated by the well-known rules of complementary base pairing (see, for example, Watson, 1987). Typically, vector mediated methodologies involve the introduction of the nucleic acid fragment into a DNA or RNA vector, the clonal amplification of the vector, and the recovery of the amplified nucleic acid fragment. Examples of such methodologies are provided by U.S. Pat. No. 4,237,224, specifically incorporated herein by reference in its entirety.

[0115] In another approach for the production of polypeptide variants of the present invention, recursive sequence recombination, as described in U.S. Pat. No. 5,837,458, may be employed. In this approach, iterative cycles of recombination and screening or selection are performed to “evolve” individual polynucleotide variants of the invention having, for example, enhanced immunogenic activity.

[0116] In other embodiments of the present invention, the polynucleotide sequences provided herein can be advantageously used as probes or primers for nucleic acid hybridization. As such, it is contemplated that nucleic acid segments that comprise or consist of a sequence region of at least about a 15 nucleotide long contiguous sequence that has the same sequence as, or is complementary to, a 15 nucleotide long contiguous sequence disclosed herein will find particular utility. Longer contiguous identical or complementary sequences, e.g., those of about 20, 30, 40, 50, 100, 200, 500, 1000 (including all intermediate lengths) and even up to full length sequences will also be of use in certain embodiments.

[0117] The ability of such nucleic acid probes to specifically hybridize to a sequence of interest will enable them to be of use in detecting the presence of complementary sequences in a given sample. However, other uses are also envisioned, such as the use of the sequence information for the preparation of mutant species primers, or primers for use in preparing other genetic constructions.

[0118] Polynucleotide molecules having sequence regions consisting of contiguous nucleotide stretches of 10-14, 15-20, 30, 50, or even of 100-200 nucleotides or so (including intermediate lengths as well), identical or complementary to a polynucleotide sequence disclosed herein, are particularly contemplated as hybridization probes for use in, e.g., Southern and Northern blotting. This would allow a gene product, or fragment thereof, to be analyzed, both in diverse cell types and also in various bacterial cells. The total size of fragment, as well as the size of the complementary stretch(es), will ultimately depend on the intended use or application of the particular nucleic acid segment. Smaller fragments will generally find use in hybridization embodiments, wherein the length of the contiguous complementary region may be varied, such as between about 15 and about 100 nucleotides, but larger contiguous complementarity stretches may be used, according to the length complementary sequences one wishes to detect.

[0119] The use of a hybridization probe of about 15-25 nucleotides in length allows the formation of a duplex molecule that is both stable and selective. Molecules having contiguous complementary sequences over stretches greater than 15 bases in length are generally preferred, though, in order to increase stability and selectivity of the hybrid, and thereby improve the quality and degree of specific hybrid molecules obtained. One will generally prefer to design nucleic acid molecules having gene-complementary stretches of 15 to 25 contiguous nucleotides, or even longer where desired.

[0120] Hybridization probes may be selected from any portion of any of the sequences disclosed herein. All that is required is to review the sequences set forth herein, or to any continuous portion of the sequences, from about 15-25 nucleotides in length up to and including the full length sequence, that one wishes to utilize as a probe or primer. The choice of probe and primer sequences may be governed by various factors. For example, one may wish to employ primers from towards the termini of the total sequence.

[0121] Small polynucleotide segments or fragments may be readily prepared by, for example, directly synthesizing the fragment by chemical means, as is commonly practiced using an automated oligonucleotide synthesizer. Also, fragments may be obtained by application of nucleic acid reproduction technology, such as the PCR™ technology of U.S. Pat. No. 4,683,202 (incorporated herein by reference), by introducing selected sequences into recombinant vectors for recombinant production, and by other recombinant DNA techniques generally known to those of skill in the art of molecular biology.

[0122] The nucleotide sequences of the invention may be used for their ability to selectively form duplex molecules with complementary stretches of the entire gene or gene fragments of interest. Depending on the application envisioned, one will typically desire to employ varying conditions of hybridization to achieve varying degrees of selectivity of probe towards target sequence. For applications requiring high selectivity, one will typically desire to employ relatively stringent conditions to form the hybrids, e.g., one will select relatively low salt and/or high temperature conditions, such as provided by a salt concentration of from about 0.02 M to about 0.15 M salt at temperatures of from about 50° C. to about 70° C. Such selective conditions tolerate little, if any, mismatch between the probe and the template or target strand, and would be particularly suitable for isolating related sequences.

[0123] Of course, for some applications, for example, where one desires to prepare mutants employing a mutant primer strand hybridized to an underlying template, less stringent (reduced stringency) hybridization conditions will typically be needed in order to allow formation of the heteroduplex. In these circumstances, one may desire to employ salt conditions such as those of from about 0.15 M to about 0.9 M salt, at temperatures ranging from about 20° C. to about 55° C. Cross-hybridizing species can thereby be readily identified as positively hybridizing signals with respect to control hybridizations. In any case, it is generally appreciated that conditions can be rendered more stringent by the addition of increasing amounts of formamide, which serves to destabilize the hybrid duplex in the same manner as increased temperature. Thus, hybridization conditions can be readily manipulated, and thus will generally be a method of choice depending on the desired results.

[0124] According to another embodiment of the present invention, polynucleotide compositions comprising antisense oligonucleotides are provided. Antisense oligonucleotides have been demonstrated to be effective and targeted inhibitors of protein synthesis, and, consequently, provide a therapeutic approach by which a disease can be treated by inhibiting the synthesis of proteins that contribute to the disease. The efficacy of antisense oligonucleotides for inhibiting protein synthesis is well established. For example, the synthesis of polygalactauronase and the muscarine type 2 acetylcholine receptor are inhibited by antisense oligonucleotides directed to their respective mRNA sequences (U.S. Pat. Nos. 5,739,119 and 5,759,829). Further, examples of antisense inhibition have been demonstrated with the nuclear protein cyclin, the multiple drug resistance gene (MDG1), ICAM-1, E-selectin, STK-1, striatal GABA_{A} receptor and human EGF (Jaskulski et al., Science. Jun. 10, 1988;240(4858):1544-6; Vasanthakumar and Ahmed, Cancer Commun. 1989;1(4):225-32; Peris et al., Brain Res Mol Brain Res. Jun. 15, 1998;57(2):310-20; U.S. Pat. Nos. 5,801,154; 5,789,573; 5,718,709 and 5,610,288). Antisense constructs have also been described that inhibit and can be used to treat a variety of abnormal cellular proliferations, e.g. cancer (U.S. Pat. Nos. 5,747,470; 5,591,317 and 5,783,683).

[0125] Therefore, in certain embodiments, the present invention provides oligonucleotide sequences that comprise all, or a portion of, any sequence that is capable of specifically binding to polynucleotide sequence described herein, or a complement thereof. In one embodiment, the antisense oligonucleotides comprise DNA or derivatives thereof. In another embodiment, the oligonucleotides comprise RNA or derivatives thereof. In a third embodiment, the oligonucleotides are modified DNAs comprising a phosphorothioated modified backbone. In a fourth embodiment, the oligonucleotide sequences comprise peptide nucleic acids or derivatives thereof. In each case, preferred compositions comprise a sequence region that is complementary, and more preferably substantially-complementary, and even more preferably, completely complementary to one or more portions of polynucleotides disclosed herein. Selection of antisense compositions specific for a given gene sequence is based upon analysis of the chosen target sequence and determination of secondary structure, Tₘ, binding energy, and relative stability. Antisense compositions may be selected based upon their relative inability to form dimers, hairpins, or other secondary structures that would reduce or prohibit specific binding to the target mRNA in a host cell. Highly preferred target regions of the mRNA, are those which are at or near the AUG translation initiation codon, and those sequences which are substantially complementary to 5′ regions of the mRNA. These secondary structure analyses and target site selection considerations can be performed, for example, using v.4 of the OLIGO primer analysis software and/or the BLASTN 2.0.5 algorithm software (Altschul et al., Nucleic Acids Res. 1997, 25(17):3389-402).

[0126] The use of an antisense delivery method employing a short peptide vector, termed MPG (27 residues), is also contemplated. The MPG peptide contains a hydrophobic domain derived from the fusion sequence of HIV gp41 and a hydrophilic domain from the nuclear localization sequence of SV40 T-antigen (Morris et al., Nucleic Acids Res. Jul. 15, 1997;25(14):2730-6). It has been demonstrated that several molecules of the MPG peptide coat the antisense oligonucleotides and can be delivered into cultured mammalian cells in less than 1 hour with relatively high efficiency (90%). Further, the interaction with MPG strongly increases both the stability of the oligonucleotide to nuclease and the ability to cross the plasma membrane.

[0127] According to another embodiment of the invention, the polynucleotide compositions described herein are used in the design and preparation of ribozyme molecules for inhibiting expression of the tumor polypeptides and proteins of the present invention in tumor cells. Ribozymes are RNA-protein complexes that cleave nucleic acids in a site-specific fashion. Ribozymes have specific catalytic domains that possess endonuclease activity (Kim and Cech, Proc Natl Acad Sci U S A. December 1987;84(24):8788-92; Forster and Symons, Cell. Apr. 24, 1987;49(2):211-20). For example, a large number of ribozymes accelerate phosphoester transfer reactions with a high degree of specificity, often cleaving only one of several phosphoesters in an oligonucleotide substrate (Cech et al., Cell. December 1981;27(3 Pt 2):487-96; Michel and Westhof, J Mol Biol. Dec. 5, 1990;216(3):585-610; Reinhold-Hurek and Shub, Nature. May 14, 1992;357(6374):173-6). This specificity has been attributed to the requirement that the substrate bind via specific base-pairing interactions to the internal guide sequence (“IGS”) of the ribozyme prior to chemical reaction.

[0128] Six basic varieties of naturally-occurring enzymatic RNAs are known presently. Each can catalyze the hydrolysis of RNA phosphodiester bonds in trans (and thus can cleave other RNA molecules) under physiological conditions. In general, enzymatic nucleic acids act by first binding to a target RNA. Such binding occurs through the target binding portion of a enzymatic nucleic acid which is held in close proximity to an enzymatic portion of the molecule that acts to cleave the target RNA. Thus, the enzymatic nucleic acid first recognizes and then binds a target RNA through complementary base-pairing, and once bound to the correct site, acts enzymatically to cut the target RNA. Strategic cleavage of such a target RNA will destroy its ability to direct synthesis of an encoded protein. After an enzymatic nucleic acid has bound and cleaved its RNA target, it is released from that RNA to search for another target and can repeatedly bind and cleave new targets.

[0129] The enzymatic nature of a ribozyme is advantageous over many technologies, such as antisense technology (where a nucleic acid molecule simply binds to a nucleic acid target to block its translation) since the concentration of ribozyme necessary to affect a therapeutic treatment is lower than that of an antisense oligonucleotide. This advantage reflects the ability of the ribozyme to act enzymatically. Thus, a single ribozyme molecule is able to cleave many molecules of target RNA. In addition, the ribozyme is a highly specific inhibitor, with the specificity of inhibition depending not only on the base pairing mechanism of binding to the target RNA, but also on the mechanism of target RNA cleavage. Single mismatches, or base-substitutions, near the site of cleavage can completely eliminate catalytic activity of a ribozyme. Similar mismatches in antisense molecules do not prevent their action (Woolf et al., Proc Natl Acad Sci U S A. Aug. 15, 1992;89(16):7305-9). Thus, the specificity of action of a ribozyme is greater than that of an antisense oligonucleotide binding the same RNA site.

[0130] The enzymatic nucleic acid molecule may be formed in a hammerhead, hairpin, a hepatitis δ virus, group I intron or RNaseP RNA (in association with an RNA guide sequence) or Neurospora VS RNA motif. Examples of hammerhead motifs are described by Rossi et al. Nucleic Acids Res. Sep. 11, 1992;20(17):4559-65. Examples of hairpin motifs are described by Hampel et al. (Eur. Pat. Appl. Publ. No. EP 0360257), Hampel and Tritz, Biochemistry Jun. 13, 1989;28(12):4929-33; Hampel et al., Nucleic Acids Res. Jan. 25, 1990;18(2):299-304 and U.S. Pat. No. 5,631,359. An example of the hepatitis δ virus motif is described by Perrotta and Been, Biochemistry. Dec. 1, 1992;31(47):11843-52; an example of the RNaseP motif is described by Guerrier-Takada et al., Cell. December 1983;35(3 Pt 2):849-57; Neurospora VS RNA ribozyme motif is described by Collins (Saville and Collins, Cell. May 18, 1990;61(4):685-96; Saville and Collins, Proc Natl Acad Sci U S A. Oct. 1, 1991;88(19):8826-30; Collins and Olive, Biochemistry. Mar. 23, 1993;32(11):2795-9); and an example of the Group I intron is described in (U.S. Pat. No. 4,987,071). All that is important in an enzymatic nucleic acid molecule of this invention is that it has a specific substrate binding site which is complementary to one or more of the target gene RNA regions, and that it have nucleotide sequences within or surrounding that substrate binding site which impart an RNA cleaving activity to the molecule. Thus the ribozyme constructs need not be limited to specific motifs mentioned herein.

[0131] Ribozymes may be designed as described in Int. Pat. Appl. Publ. No. WO 93/23569 and Int. Pat. Appl. Publ. No. WO 94/02595, each specifically incorporated herein by reference) and synthesized to be tested in vitro and in vivo, as described. Such ribozymes can also be optimized for delivery. While specific examples are provided, those in the art will recognize that equivalent RNA targets in other species can be utilized when necessary.

[0132] Ribozyme activity can be optimized by altering the length of the ribozyme binding arms, or chemically synthesizing ribozymes with modifications that prevent their degradation by serum ribonucleases (see e.g., Int. Pat. Appl. Publ. No. WO 92/07065; Int. Pat. Appl. Publ. No. WO 93/15187; Int. Pat. Appl. Publ. No. WO 91/03162; Eur. Pat. Appl. Publ. No. 92110298.4; U.S. Pat. No. 5,334,711; and Int. Pat. Appl. Publ. No. WO 94/13688, which describe various chemical modifications that can be made to the sugar moieties of enzymatic RNA molecules), modifications which enhance their efficacy in cells, and removal of stem II bases to shorten RNA synthesis times and reduce chemical requirements.

[0133] Sullivan et al. (Int. Pat. Appl. Publ. No. WO 94/02595) describes the general methods for delivery of enzymatic RNA molecules. Ribozymes may be administered to cells by a variety of methods known to those familiar to the art, including, but not restricted to, encapsulation in liposomes, by iontophoresis, or by incorporation into other vehicles, such as hydrogels, cyclodextrins, biodegradable nanocapsules, and bioadhesive microspheres. For some indications, ribozymes may be directly delivered ex vivo to cells or tissues with or without the aforementioned vehicles. Alternatively, the RNA/vehicle combination may be locally delivered by direct inhalation, by direct injection or by use of a catheter, infusion pump or stent. Other routes of delivery include, but are not limited to, intravascular, intramuscular, subcutaneous or joint injection, aerosol inhalation, oral (tablet or pill form), topical, systemic, ocular, intraperitoneal and/or intrathecal delivery. More detailed descriptions of ribozyme delivery and administration are provided in Int. Pat. Appl. Publ. No. WO 94/02595 and Int. Pat. Appl. Publ. No. WO 93/23569, each specifically incorporated herein by reference.

[0134] Another means of accumulating high concentrations of a ribozyme(s) within cells is to incorporate the ribozyme-encoding sequences into a DNA expression vector. Transcription of the ribozyme sequences are driven from a promoter for eukaryotic RNA polymerase I (pol I), RNA polymerase II (pol II), or RNA polymerase III (pol III). Transcripts from pol II or pol III promoters will be expressed at high levels in all cells; the levels of a given pol II promoter in a given cell type will depend on the nature of the gene regulatory sequences (enhancers, silencers, etc.) present nearby. Prokaryotic RNA polymerase promoters may also be used, providing that the prokaryotic RNA polymerase enzyme is expressed in the appropriate cells Ribozymes expressed from such promoters have been shown to function in mammalian cells. Such transcription units can be incorporated into a variety of vectors for introduction into mammalian cells, including but not restricted to, plasmid DNA vectors, viral DNA vectors (such as adenovirus or adeno-associated vectors), or viral RNA vectors (such as retroviral, semliki forest virus, sindbis virus vectors).

[0135] In another embodiment of the invention, peptide nucleic acids (PNAs) compositions are provided. PNA is a DNA mimic in which the nucleobases are attached to a pseudopeptide backbone (Good and Nielsen, Antisense Nucleic Acid Drug Dev. 1997 7(4) 431-37). PNA is able to be utilized in a number methods that traditionally have used RNA or DNA. Often PNA sequences perform better in techniques than the corresponding RNA or DNA sequences and have utilities that are not inherent to RNA or DNA. A review of PNA including methods of making, characteristics of, and methods of using, is provided by Corey (TrendsBiotechnol June 1997;15(6):224-9). As such, in certain embodiments, one may prepare PNA sequences that are complementary to one or more portions of the ACE mRNA sequence, and such PNA compositions may be used to regulate, alter, decrease, or reduce the translation of ACE-specific mRNA, and thereby alter the level of ACE activity in a host cell to which such PNA compositions have been administered.

[0136] PNAs have 2-aminoethyl-glycine linkages replacing the normal phosphodiester backbone of DNA (Nielsen et al., Science Dec. 6, 1991;254(5037):1497-500; Hanvey et al., Science. Nov. 27, 1992;258(5087):1481-5; Hyrup and Nielsen, Bioorg Med Chem. January 1996;4(1):5-23). This chemistry has three important consequences: firstly, in contrast to DNA or phosphorothioate oligonucleotides, PNAs are neutral molecules; secondly, PNAs are achiral, which avoids the need to develop a stereoselective synthesis; and thirdly, PNA synthesis uses standard Boc or Fmoc protocols for solid-phase peptide synthesis, although other methods, including a modified Merrifield method, have been used.

[0137] PNA monomers or ready-made oligomers are commercially available from PerSeptive Biosystems (Framingham, Mass.). PNA syntheses by either Boc or Fmoc protocols are straightforward using manual or automated protocols (Norton et al, Bioorg Med Chem. April 1995;3(4):437-45). The manual protocol lends itself to the production of chemically modified PNAs or the simultaneous synthesis of families of closely related PNAs.

[0138] As with peptide synthesis, the success of a particular PNA synthesis will depend on the properties of the chosen sequence. For example, while in theory PNAs can incorporate any combination of nucleotide bases, the presence of adjacent purines can lead to deletions of one or more residues in the product. In expectation of this difficulty, it is suggested that, in producing PNAs with adjacent purines, one should repeat the coupling of residues likely to be added inefficiently. This should be followed by the purification of PNAs by reverse-phase high-pressure liquid chromatography, providing yields and purity of product similar to those observed during the synthesis of peptides.

[0139] Modifications of PNAs for a given application may be accomplished by coupling amino acids during solid-phase synthesis or by attaching compounds that contain a carboxylic acid group to the exposed N-terminal amine. Alternatively, PNAs can be modified after synthesis by coupling to an introduced lysine or cysteine. The ease with which PNAs can be modified facilitates optimization for better solubility or for specific functional requirements. Once synthesized, the identity of PNAs and their derivatives can be confirmed by mass spectrometry. Several studies have made and utilized modifications of PNAs (for example, Norton et al., Bioorg Med Chem. April 1995;3(4):437-45; Petersen et al., J Pept Sci. May-June 1995;1(3):175-83; Orum et al., Biotechniques. September 1995;19(3):472-80; Footer et al., Biochemistry. Aug. 20, 1996;35(33):10673-9; Griffith et al., Nucleic Acids Res. Aug. 11, 1995;23(15):3003-8; Pardridge et al., Proc Natl Acad Sci U S A. Jun. 6, 1995;92(12):5592-6; Boffa et al., Proc Natl Acad Sci U S A. Mar. 14, 1995;92(6):1901-5; Gambacorti-Passerini et al., Blood. Aug. 15, 1996;88(4):1411-7; Armitage et al., Proc Natl Acad Sci U S A. Nov. 11, 1997;94(23):12320-5; Seeger et al., Biotechniques. September 1997;23(3):512-7). U.S. Pat. No. 5,700,922 discusses PNA-DNA-PNA chimeric molecules and their uses in diagnostics, modulating protein in organisms, and treatment of conditions susceptible to therapeutics.

[0140] Methods of characterizing the antisense binding properties of PNAs are discussed in Rose (Anal Chem. Dec. 15, 1993;65(24):3545-9) and Jensen et al. (Biochemistry. Apr. 22, 1997;36(16):5072-7). Rose uses capillary gel electrophoresis to determine binding of PNAs to their complementary oligonucleotide, measuring the relative binding kinetics and stoichiometry. Similar types of measurements were made by Jensen et al. using BIAcore™ technology.

[0141] Other applications of PNAs that have been described and will be apparent to the skilled artisan include use in DNA strand invasion, antisense inhibition, mutational analysis, enhancers of transcription, nucleic acid purification, isolation of transcriptionally active genes, blocking of transcription factor binding, genome cleavage, biosensors, in situ hybridization, and the like.

[0142] Polynucleotide Identification, Characterization and Expression

[0143] Polynucleotides compositions of the present invention may be identified, prepared and/or manipulated using any of a variety of well established techniques (see generally, Sambrook et al., Molecular Cloning: A Laboratory Manual, Cold Spring Harbor Laboratories, Cold Spring Harbor, N.Y., 1989, and other like references). For example, a polynucleotide may be identified, as described in more detail below, by screening a microarray of cDNAs for tumor-associated expression (i.e., expression that is at least two fold greater in a tumor than in normal tissue, as determined using a representative assay provided herein). Such screens may be performed, for example, using the microarray technology of Affymetrix, Inc. (Santa Clara, Calif.) according to the manufacturer's instructions (and essentially as described by Schena et al., Proc. Natl. Acad. Sci. USA 93:10614-10619, 1996 and Heller et al., Proc. Natl. Acad. Sci. USA 94:2150-2155, 1997). Alternatively, polynucleotides may be amplified from cDNA prepared from cells expressing the proteins described herein, such as tumor cells.

[0144] Many template dependent processes are available to amplify a target sequences of interest present in a sample. One of the best known amplification methods is the polymerase chain reaction (PCR™) which is described in detail in U.S. Pat. Nos. 4,683,195, 4,683,202 and 4,800,159, each of which is incorporated herein by reference in its entirety. Briefly, in PCR™, two primer sequences are prepared which are complementary to regions on opposite complementary strands of the target sequence. An excess of deoxynucleoside triphosphates is added to a reaction mixture along with a DNA polymerase (e.g., Taq polymerase). If the target sequence is present in a sample, the primers will bind to the target and the polymerase will cause the primers to be extended along the target sequence by adding on nucleotides. By raising and lowering the temperature of the reaction mixture, the extended primers will dissociate from the target to form reaction products, excess primers will bind to the target and to the reaction product and the process is repeated. Preferably reverse transcription and PCR™ amplification procedure may be performed in order to quantify the amount of mRNA amplified. Polymerase chain reaction methodologies are well known in the art.

[0145] Any of a number of other template dependent processes, many of which are variations of the PCR™ amplification technique, are readily known and available in the art. Illustratively, some such methods include the ligase chain reaction (referred to as LCR), described, for example, in Eur. Pat. Appl. Publ. No. 320,308 and U.S. Pat. No. 4,883,750; Qbeta Replicase, described in PCT Intl. Pat. Appl. Publ. No. PCT/US87/00880; Strand Displacement Amplification (SDA) and Repair Chain Reaction (RCR). Still other amplification methods are described in Great Britain Pat. Appl. No. 2 202 328, and in PCT intl. Pat. Appl. Publ. No. PCT/US89/01025. Other nucleic acid amplification procedures include transcription-based amplification systems (TAS) (PCT Intl. Pat. Appl. Publ. No. WO 88/10315), including nucleic acid sequence based amplification (NASBA) and 3SR. Eur. Pat. Appl. Publ. No. 329,822 describes a nucleic acid amplification process involving cyclically synthesizing single-stranded RNA (“ssRNA”), ssDNA, and double-stranded DNA (dsDNA). PCT Intl. Pat. Appl. Publ. No. WO 89/06700 describes a nucleic acid sequence amplification scheme based on the hybridization of a promoter/primer sequence to a target single-stranded DNA (“ssDNA”) followed by transcription of many RNA copies of the sequence. Other amplification methods such as “RACE” (Frohman, 1990), and “one-sided PCR” (Ohara, 1989) are also well-known to those of skill in the art.

[0146] An amplified portion of a polynucleotide of the present invention may be used to isolate a full length gene from a suitable library (e.g., a tumor cDNA library) using well known techniques. Within such techniques, a library (cDNA or genomic) is screened using one or more polynucleotide probes or primers suitable for amplification. Preferably, a library is size-selected to include larger molecules. Random primed libraries may also be preferred for identifying 5′ and upstream regions of genes. Genomic libraries are preferred for obtaining introns and extending 5′ sequences.

[0147] For hybridization techniques, a partial sequence may be labeled (e.g., by nick-translation or end-labeling with ³²P) using well known techniques. A bacterial or bacteriophage library is then generally screened by hybridizing filters containing denatured bacterial colonies (or lawns containing phage plaques) with the labeled probe (see Sambrook et al., Molecular Cloning: A Laboratory Manual, Cold Spring Harbor Laboratories, Cold Spring Harbor, N.Y., 1989). Hybridizing colonies or plaques are selected and expanded, and the DNA is isolated for further analysis. cDNA clones may be analyzed to determine the amount of additional sequence by, for example, PCR using a primer from the partial sequence and a primer from the vector. Restriction maps and partial sequences may be generated to identify one or more overlapping clones. The complete sequence may then be determined using standard techniques, which may involve generating a series of deletion clones. The resulting overlapping sequences can then assembled into a single contiguous sequence. A full length cDNA molecule can be generated by ligating suitable fragments, using well known techniques.

[0148] Alternatively, amplification techniques, such as those described above, can be useful for obtaining a full length coding sequence from a partial cDNA sequence. One such amplification technique is inverse PCR (see Triglia et al., Nucl. Acids Res. 16:8186, 1988), which uses restriction enzymes to generate a fragment in the known region of the gene. The fragment is then circularized by intramolecular ligation and used as a template for PCR with divergent primers derived from the known region. Within an alternative approach, sequences adjacent to a partial sequence may be retrieved by amplification with a primer to a linker sequence and a primer specific to a known region. The amplified sequences are typically subjected to a second round of amplification with the same linker primer and a second primer specific to the known region. A variation on this procedure, which employs two primers that initiate extension in opposite directions from the known sequence, is described in WO 96/38591. Another such technique is known as “rapid amplification of cDNA ends” or RACE. This technique involves the use of an internal primer and an external primer, which hybridizes to a polyA region or vector sequence, to identify sequences that are 5′ and 3′ of a known sequence. Additional techniques include capture PCR (Lagerstrom et al., PCR Methods Applic. 1:111-19, 1991) and walking PCR (Parker et al., Nucl. Acids. Res. 19:3055-60, 1991). Other methods employing amplification may also be employed to obtain a full length cDNA sequence.

[0149] In certain instances, it is possible to obtain a full length cDNA sequence by analysis of sequences provided in an expressed sequence tag (EST) database, such as that available from GenBank. Searches for overlapping ESTs may generally be performed using well known programs (e.g., NCBI BLAST searches), and such ESTs may be used to generate a contiguous full length sequence. Full length DNA sequences may also be obtained by analysis of genomic fragments.

[0150] In other embodiments of the invention, polynucleotide sequences or fragments thereof which encode polypeptides of the invention, or fusion proteins or functional equivalents thereof, may be used in recombinant DNA molecules to direct expression of a polypeptide in appropriate host cells. Due to the inherent degeneracy of the genetic code, other DNA sequences that encode substantially the same or a functionally equivalent amino acid sequence may be produced and these sequences may be used to clone and express a given polypeptide.

[0151] As will be understood by those of skill in the art, it may be advantageous in some instances to produce polypeptide-encoding nucleotide sequences possessing non-naturally occurring codons. For example, codons preferred by a particular prokaryotic or eukaryotic host can be selected to increase the rate of protein expression or to produce a recombinant RNA transcript having desirable properties, such as a half-life which is longer than that of a transcript generated from the naturally occurring sequence.

[0152] Moreover, the polynucleotide sequences of the present invention can be engineered using methods generally known in the art in order to alter polypeptide encoding sequences for a variety of reasons, including but not limited to, alterations which modify the cloning, processing, and/or expression of the gene product. For example, DNA shuffling by random fragmentation and PCR reassembly of gene fragments and synthetic oligonucleotides may be used to engineer the nucleotide sequences. In addition, site-directed mutagenesis may be used to insert new restriction sites, alter glycosylation patterns, change codon preference, produce splice variants, or introduce mutations, and so forth.

[0153] In another embodiment of the invention, natural, modified, or recombinant nucleic acid sequences may be ligated to a heterologous sequence to encode a fusion protein. For example, to screen peptide libraries for inhibitors of polypeptide activity, it may be useful to encode a chimeric protein that can be recognized by a commercially available antibody. A fusion protein may also be engineered to contain a cleavage site located between the polypeptide-encoding sequence and the heterologous protein sequence, so that the polypeptide may be cleaved and purified away from the heterologous moiety.

[0154] Sequences encoding a desired polypeptide may be synthesized, in whole or in part, using chemical methods well known in the art (see Caruthers, M. H. et al. (1980) Nucl. Acids Res. Symp. Ser. 215-223, Horn, T. et al. (1980) Nucl. Acids Res. Symp. Ser. 225-232). Alternatively, the protein itself may be produced using chemical methods to synthesize the amino acid sequence of a polypeptide, or a portion thereof. For example, peptide synthesis can be performed using various solid-phase techniques (Roberge, J. Y. et al. (1995) Science 269:202-204) and automated synthesis may be achieved, for example, using the ABI 431A Peptide Synthesizer (Perkin Elmer, Palo Alto, Calif.).

[0155] A newly synthesized peptide may be substantially purified by preparative high performance liquid chromatography (e.g., Creighton, T. (1983) Proteins, Structures and Molecular Principles, W H Freeman and Co., New York, N.Y.) or other comparable techniques available in the art. The composition of the synthetic peptides may be confirmed by amino acid analysis or sequencing (e.g., the Edman degradation procedure). Additionally, the amino acid sequence of a polypeptide, or any part thereof, may be altered during direct synthesis and/or combined using chemical methods with sequences from other proteins, or any part thereof, to produce a variant polypeptide.

[0156] In order to express a desired polypeptide, the nucleotide sequences encoding the polypeptide, or functional equivalents, may be inserted into appropriate expression vector, i.e., a vector which contains the necessary elements for the transcription and translation of the inserted coding sequence. Methods which are well known to those skilled in the art may be used to construct expression vectors containing sequences encoding a polypeptide of interest and appropriate transcriptional and translational control elements. These methods include in vitro recombinant DNA techniques, synthetic techniques, and in vivo genetic recombination. Such techniques are described, for example, in Sambrook, J. et al. (1989) Molecular Cloning, A Laboratory Manual, Cold Spring Harbor Press, Plainview, N.Y., and Ausubel, F. M. et al. (1989) Current Protocols in Molecular Biology, John Wiley & Sons, New York. N.Y.

[0157] A variety of expression vector/host systems may be utilized to contain and express polynucleotide sequences. These include, but are not limited to, microorganisms such as bacteria transformed with recombinant bacteriophage, plasmid, or cosmid DNA expression vectors; yeast transformed with yeast expression vectors; insect cell systems infected with virus expression vectors (e.g., baculovirus); plant cell systems transformed with virus expression vectors (e.g., cauliflower mosaic virus, CaMV; tobacco mosaic virus, TMV) or with bacterial expression vectors (e.g., Ti or pBR322 plasmids); or animal cell systems.

[0158] The “control elements” or “regulatory sequences” present in an expression vector are those non-translated regions of the vector—enhancers, promoters, 5′ and 3′ untranslated regions—which interact with host cellular proteins to carry out transcription and translation. Such elements may vary in their strength and specificity. Depending on the vector system and host utilized, any number of suitable transcription and translation elements, including constitutive and inducible promoters, may be used. For example, when cloning in bacterial systems, inducible promoters such as the hybrid lacZ promoter of the pBLUESCRIPT phagemid (Stratagene, La Jolla, Calif.) or pSPORT1 plasmid (Gibco BRL, Gaithersburg, Md.) and the like may be used. In mammalian cell systems, promoters from mammalian genes or from mammalian viruses are generally preferred. If it is necessary to generate a cell line that contains multiple copies of the sequence encoding a polypeptide, vectors based on SV40 or EBV may be advantageously used with an appropriate selectable marker.

[0159] In bacterial systems, any of a number of expression vectors may be selected depending upon the use intended for the expressed polypeptide. For example, when large quantities are needed, for example for the induction of antibodies, vectors which direct high level expression of fusion proteins that are readily purified may be used. Such vectors include, but are not limited to, the multifunctional E. coli cloning and expression vectors such as pBLUESCRIPT (Stratagene), in which the sequence encoding the polypeptide of interest may be ligated into the vector in frame with sequences for the amino-terminal Met and the subsequent 7 residues of .beta.-galactosidase so that a hybrid protein is produced; pIN vectors (Van Heeke, G. and S. M. Schuster (1989) J. Biol. Chem. 264:5503-5509); and the like. pGEX Vectors (Promega, Madison, Wis.) may also be used to express foreign polypeptides as fusion proteins with glutathione S-transferase (GST). In general, such fusion proteins are soluble and can easily be purified from lysed cells by adsorption to glutathione-agarose beads followed by elution in the presence of free glutathione. Proteins made in such systems may be designed to include heparin, thrombin, or factor XA protease cleavage sites so that the cloned polypeptide of interest can be released from the GST moiety at will.

[0160] In the yeast, Saccharomyces cerevisiae, a number of vectors containing constitutive or inducible promoters such as alpha factor, alcohol oxidase, and PGH may be used. For reviews, see Ausubel et al. (supra) and Grant et al. (1987) Methods Enzymol. 153:516-544.

[0161] In cases where plant expression vectors are used, the expression of sequences encoding polypeptides may be driven by any of a number of promoters. For example, viral promoters such as the 35S and 19S promoters of CaMV may be used alone or in combination with the omega leader sequence from TMV (Takamatsu, N. (1987) EMBO J. 6:307-311. Alternatively, plant promoters such as the small subunit of RUBISCO or heat shock promoters may be used (Coruzzi, G. et al. (1984) EMBO J. 3:1671-1680; Broglie, R. et al. (1984) Science 224:838-843; and Winter, J. et al. (1991) Results Probl. Cell Differ. 17:85-105). These constructs can be introduced into plant cells by direct DNA transformation or pathogen-mediated transfection. Such techniques are described in a number of generally available reviews (see, for example, Hobbs, S. or Murry, L. E. in McGraw Hill Yearbook of Science and Technology (1992) McGraw Hill, New York, N.Y.; pp. 191-196).

[0162] An insect system may also be used to express a polypeptide of interest. For example, in one such system, Autographa californica nuclear polyhedrosis virus (AcNPV) is used as a vector to express foreign genes in Spodoptera frugiperda cells or in Trichoplusia larvae. The sequences encoding the polypeptide may be cloned into a non-essential region of the virus, such as the polyhedrin gene, and placed under control of the polyhedrin promoter. Successful insertion of the polypeptide-encoding sequence will render the polyhedrin gene inactive and produce recombinant virus lacking coat protein. The recombinant viruses may then be used to infect, for example, S. frugiperda cells or Trichoplusia larvae in which the polypeptide of interest may be expressed (Engelhard, E. K. et al. (1994) Proc. Natl. Acad. Sci. 91 :3224-3227).

[0163] In mammalian host cells, a number of viral-based expression systems are generally available. For example, in cases where an adenovirus is used as an expression vector, sequences encoding a polypeptide of interest may be ligated into an adenovirus transcription/translation complex consisting of the late promoter and tripartite leader sequence. Insertion in a non-essential E1 or E3 region of the viral genome may be used to obtain a viable virus which is capable of expressing the polypeptide in infected host cells (Logan, J. and Shenk, T. (1984) Proc. Natl. Acad. Sci. 81:3655-3659). In addition, transcription enhancers, such as the Rous sarcoma virus (RSV) enhancer, may be used to increase expression in mammalian host cells.

[0164] Specific initiation signals may also be used to achieve more efficient translation of sequences encoding a polypeptide of interest. Such signals include the ATG initiation codon and adjacent sequences. In cases where sequences encoding the polypeptide, its initiation codon, and upstream sequences are inserted into the appropriate expression vector, no additional transcriptional or translational control signals may be needed. However, in cases where only coding sequence, or a portion thereof, is inserted, exogenous translational control signals including the ATG initiation codon should be provided. Furthermore, the initiation codon should be in the correct reading frame to ensure translation of the entire insert. Exogenous translational elements and initiation codons may be of various origins, both natural and synthetic. The efficiency of expression may be enhanced by the inclusion of enhancers which are appropriate for the particular cell system which is used, such as those described in the literature (Scharf, D. et al. (1994) Results Probl. Cell Differ. 20:125-162).

[0165] In addition, a host cell strain may be chosen for its ability to modulate the expression of the inserted sequences or to process the expressed protein in the desired fashion. Such modifications of the polypeptide include, but are not limited to, acetylation, carboxylation. glycosylation, phosphorylation, lipidation, and acylation. Post-translational processing which cleaves a “prepro” form of the protein may also be used to facilitate correct insertion, folding and/or function. Different host cells such as CHO, COS, HeLa, MDCK, HEK293, and WI38, which have specific cellular machinery and characteristic mechanisms for such post-translational activities, may be chosen to ensure the correct modification and processing of the foreign protein.

[0166] For long-term, high-yield production of recombinant proteins, stable expression is generally preferred. For example, cell lines which stably express a polynucleotide of interest may be transformed using expression vectors which may contain viral origins of replication and/or endogenous expression elements and a selectable marker gene on the same or on a separate vector. Following the introduction of the vector, cells may be allowed to grow for 1-2 days in an enriched media before they are switched to selective media. The purpose of the selectable marker is to confer resistance to selection, and its presence allows growth and recovery of cells which successfully express the introduced sequences. Resistant clones of stably transformed cells may be proliferated using tissue culture techniques appropriate to the cell type.

[0167] Any number of selection systems may be used to recover transformed cell lines. These include, but are not limited to, the herpes simplex virus thymidine kinase (Wigler, M. et al. (1977) Cell 11:223-32) and adenine phosphoribosyltransferase (Lowy, I. et al. (1990) Cell 22:817-23) genes which can be employed in tk.sup.- or aprt.sup.-cells, respectively. Also, antimetabolite, antibiotic or herbicide resistance can be used as the basis for selection; for example, dhfr which confers resistance to methotrexate (Wigler, M. et al. (1980) Proc. Natl. Acad. Sci. 77:3567-70); npt, which confers resistance to the aminoglycosides, neomycin and G-418 (Colbere-Garapin, F. et al (1981) J. Mol Biol. 150:1-14); and als or pat, which confer resistance to chlorsulfuron and phosphinotricin acetyltransferase, respectively (Murry, supra). Additional selectable genes have been described, for example, trpB, which allows cells to utilize indole in place of tryptophan, or hisD, which allows cells to utilize histinol in place of histidine (Hartman, S. C. and R. C. Mulligan (1988) Proc. Natl. Acad. Sci. 85:8047-51). The use of visible markers has gained popularity with such markers as anthocyanins, beta-glucuronidase and its substrate GUS, and luciferase and its substrate luciferin, being widely used not only to identify transformants, but also to quantify the amount of transient or stable protein expression attributable to a specific vector system (Rhodes, C. A. et al. (1995) Methods Mol. Biol. 55:121-131).

[0168] Although the presence/absence of marker gene expression suggests that the gene of interest is also present, its presence and expression may need to be confirmed. For example, if the sequence encoding a polypeptide is inserted within a marker gene sequence, recombinant cells containing sequences can be identified by the absence of marker gene function. Alternatively, a marker gene can be placed in tandem with a polypeptide-encoding sequence under the control of a single promoter. Expression of the marker gene in response to induction or selection usually indicates expression of the tandem gene as well.

[0169] Alternatively, host cells that contain and express a desired polynucleotide sequence may be identified by a variety of procedures known to those of skill in the art. These procedures include, but are not limited to, DNA-DNA or DNA-RNA hybridizations and protein bioassay or immunoassay techniques which include, for example, membrane, solution, or chip based technologies for the detection and/or quantification of nucleic acid or protein.

[0170] A variety of protocols for detecting and measuring the expression of polynucleotide-encoded products, using either polyclonal or monoclonal antibodies specific for the product are known in the art. Examples include enzyme-linked immunosorbent assay (ELISA), radioimmunoassay (RIA), and fluorescence activated cell sorting (FACS). A two-site, monoclonal-based immunoassay utilizing monoclonal antibodies reactive to two non-interfering epitopes on a given polypeptide may be preferred for some applications, but a competitive binding assay may also be employed. These and other assays are described, among other places, in Hampton, R. et al. (1990; Serological Methods, a Laboratory Manual, APS Press, St Paul. Minn.) and Maddox, D. E. et al. (1983; J. Exp. Med. 158:1211-1216).

[0171] A wide variety of labels and conjugation techniques are known by those skilled in the art and may be used in various nucleic acid and amino acid assays. Means for producing labeled hybridization or PCR probes for detecting sequences related to polynucleotides include oligolabeling, nick translation, end-labeling or PCR amplification using a labeled nucleotide. Alternatively, the sequences, or any portions thereof may be cloned into a vector for the production of an mRNA probe. Such vectors are known in the art, are commercially available, and may be used to synthesize RNA probes in vitro by addition of an appropriate RNA polymerase such as T7, T3, or SP6 and labeled nucleotides. These procedures may be conducted using a variety of commercially available kits. Suitable reporter molecules or labels, which may be used include radionuclides, enzymes, fluorescent, chemiluminescent, or chromogenic agents as well as substrates, cofactors, inhibitors, magnetic particles, and the like.

[0172] Host cells transformed with a polynucleotide sequence of interest may be cultured under conditions suitable for the expression and recovery of the protein from cell culture. The protein produced by a recombinant cell may be secreted or contained intracellularly depending on the sequence and/or the vector used. As will be understood by those of skill in the art, expression vectors containing polynucleotides of the invention may be designed to contain signal sequences which direct secretion of the encoded polypeptide through a prokaryotic or eukaryotic cell membrane. Other recombinant constructions may be used to join sequences encoding a polypeptide of interest to nucleotide sequence encoding a polypeptide domain which will facilitate purification of soluble proteins. Such purification facilitating domains include, but are not limited to, metal chelating peptides such as histidine-tryptophan modules that allow purification on immobilized metals, protein A domains that allow purification on immobilized immunoglobulin, and the domain utilized in the FLAGS extension/affinity purification system (Immunex Corp., Seattle, Wash.). The inclusion of cleavable linker sequences such as those specific for Factor XA or enterokinase (Invitrogen. San Diego, Calif.) between the purification domain and the encoded polypeptide may be used to facilitate purification. One such expression vector provides for expression of a fusion protein containing a polypeptide of interest and a nucleic acid encoding 6 histidine residues preceding a thioredoxin or an enterokinase cleavage site. The histidine residues facilitate purification on IMIAC (immobilized metal ion affinity chromatography) as described in Porath, J. et al. (1992, Prot. Exp. Purif. 3:263-281) while the enterokinase cleavage site provides a means for purifying the desired polypeptide from the fusion protein. A discussion of vectors which contain fusion proteins is provided in Kroll, D. J. et al. (1993; DNA Cell Biol. 12:441-453).

[0173] In addition to recombinant production methods, polypeptides of the invention, and fragments thereof, may be produced by direct peptide synthesis using solid-phase techniques (Merrifield J. (1963) J. Am. Chem. Soc. 85:2149-2154). Protein synthesis may be performed using manual techniques or by automation. Automated synthesis may be achieved, for example, using Applied Biosystems 431A Peptide Synthesizer (Perkin Elmer). Alternatively, various fragments may be chemically synthesized separately and combined using chemical methods to produce the full length molecule.

[0174] Antibody Compositions Fragments Thereof and Other Binding Agents

[0175] According to another aspect, the present invention further provides binding agents, such as antibodies and antigen-binding fragments thereof, that exhibit immunological binding to a tumor polypeptide disclosed herein, or to a portion, variant or derivative thereof. An antibody, or antigen-binding fragment thereof, is said to “specifically bind,” “immunogically bind,” and/or is “immunologically reactive” to a polypeptide of the invention if it reacts at a detectable level (within, for example, an ELISA assay) with the polypeptide, and does not react detectably with unrelated polypeptides under similar conditions.

[0176] Immunological binding, as used in this context, generally refers to the non-covalent interactions of the type which occur between an immunoglobulin molecule and an antigen for which the immunoglobulin is specific. The strength, or affinity of immunological binding interactions can be expressed in terms of the dissociation constant (K_{d}) of the interaction, wherein a smaller K_{d} represents a greater affinity. Immunological binding properties of selected polypeptides can be quantified using methods well known in the art. One such method entails measuring the rates of antigen-binding site/antigen complex formation and dissociation, wherein those rates depend on the concentrations of the complex partners, the affinity of the interaction, and on geometric parameters that equally influence the rate in both directions. Thus, both the “on rate constant” (Kₒₙ) and the “off rate constant” (K_{off}) can be determined by calculation of the concentrations and the actual rates of association and dissociation. The ratio of K_{off}/Kₒₙ enables cancellation of all parameters not related to affinity, and is thus equal to the dissociation constant K_{d}. See, generally, Davies et al. (1990) Annual Rev. Biochem. 59:439-473.

[0177] An “antigen-binding site,” or “binding portion” of an antibody refers to the part of the immunoglobulin molecule that participates in antigen binding. The antigen binding site is formed by amino acid residues of the N-terminal variable (“V”) regions of the heavy (“H”) and light (“L”) chains. Three highly divergent stretches within the V regions of the heavy and light chains are referred to as “hypervariable regions” which are interposed between more conserved flanking stretches known as “framework regions,” or “FRs”. Thus the term “FR” refers to amino acid sequences which are naturally found between and adjacent to hypervariable regions in immunoglobulins. In an antibody molecule, the three hypervariable regions of a light chain and the three hypervariable regions of a heavy chain are disposed relative to each other in three dimensional space to form an antigen-binding surface. The antigen-binding surface is complementary to the three-dimensional surface of a bound antigen, and the three hypervariable regions of each of the heavy and light chains are referred to as “complementarity-determining regions,” or “CDRs.”

[0178] Binding agents may be further capable of differentiating between patients with and without a cancer, such as colon cancer, using the representative assays provided herein. For example, antibodies or other binding agents that bind to a tumor protein will preferably generate a signal indicating the presence of a cancer in at least about 20% of patients with the disease, more preferably at least about 30% of patients. Alternatively, or in addition, the antibody will generate a negative signal indicating the absence of the disease in at least about 90% of individuals without the cancer. To determine whether a binding agent satisfies this requirement, biological samples (e.g., blood, sera, sputum, urine and/or tumor biopsies) from patients with and without a cancer (as determined using standard clinical tests) may be assayed as described herein for the presence of polypeptides that bind to the binding agent. Preferably, a statistically significant number of samples with and without the disease will be assayed. Each binding agent should satisfy the above criteria; however, those of ordinary skill in the art will recognize that binding agents may be used in combination to improve sensitivity.

[0179] Any agent that satisfies the above requirements may be a binding agent. For example, a binding agent may be a ribosome, with or without a peptide component, an RNA molecule or a polypeptide. In a preferred embodiment, a binding agent is an antibody or an antigen-binding fragment thereof. Antibodies may be prepared by any of a variety of techniques known to those of ordinary skill in the art. See, e.g., Harlow and Lane, Antibodies: A Laboratory Manual, Cold Spring Harbor Laboratory, 1988. In general, antibodies can be produced by cell culture techniques, including the generation of monoclonal antibodies as described herein, or via transfection of antibody genes into suitable bacterial or mammalian cell hosts, in order to allow for the production of recombinant antibodies. In one technique, an immunogen comprising the polypeptide is initially injected into any of a wide variety of mammals (e.g., mice, rats, rabbits, sheep or goats). In this step, the polypeptides of this invention may serve as the immunogen without modification. Alternatively, particularly for relatively short polypeptides, a superior immune response may be elicited if the polypeptide is joined to a carrier protein, such as bovine serum albumin or keyhole limpet hemocyanin. The immunogen is injected into the animal host, preferably according to a predetermined schedule incorporating one or more booster immunizations, and the animals are bled periodically. Polyclonal antibodies specific for the polypeptide may then be purified from such antisera by, for example, affinity chromatography using the polypeptide coupled to a suitable solid support.

[0180] Monoclonal antibodies specific for an antigenic polypeptide of interest may be prepared, for example, using the technique of Kohler and Milstein, Eur. J. Immunol. 6:511-519, 1976, and improvements thereto. Briefly, these methods involve the preparation of immortal cell lines capable of producing antibodies having the desired specificity (i.e., reactivity with the polypeptide of interest). Such cell lines may be produced, for example, from spleen cells obtained from an animal immunized as described above. The spleen cells are then immortalized by, for example, fusion with a myeloma cell fusion partner, preferably one that is syngeneic with the immunized animal. A variety of fusion techniques may be employed. For example, the spleen cells and myeloma cells may be combined with a nonionic detergent for a few minutes and then plated at low density on a selective medium that supports the growth of hybrid cells, but not myeloma cells. A preferred selection technique uses HAT (hypoxanthine, aminopterin, thymidine) selection. After a sufficient time, usually about 1 to 2 weeks, colonies of hybrids are observed. Single colonies are selected and their culture supernatants tested for binding activity against the polypeptide. Hybridomas having high reactivity and specificity are preferred.

[0181] Monoclonal antibodies may be isolated from the supernatants of growing hybridoma colonies. In addition, various techniques may be employed to enhance the yield, such as injection of the hybridoma cell line into the peritoneal cavity of a suitable vertebrate host, such as a mouse. Monoclonal antibodies may then be harvested from the ascites fluid or the blood. Contaminants may be removed from the antibodies by conventional techniques, such as chromatography, gel filtration, precipitation, and extraction. The polypeptides of this invention may be used in the purification process in, for example, an affinity chromatography step.

[0182] A number of therapeutically useful molecules are known in the art which comprise antigen-binding sites that are capable of exhibiting immunological binding properties of an antibody molecule. The proteolytic enzyme papain preferentially cleaves IgG molecules to yield several fragments, two of which (the “F(ab)” fragments) each comprise a covalent heterodimer that includes an intact antigen-binding site. The enzyme pepsin is able to cleave IgG molecules to provide several fragments, including the “F(ab′)₂” fragment which comprises both antigen-binding sites. An “Fv” fragment can be produced by preferential proteolytic cleavage of an IgM, and on rare occasions IgG or IgA immunoglobulin molecule. Fv fragments are, however, more commonly derived using recombinant techniques known in the art. The Fv fragment includes a non-covalent V_{H}::V_{L} heterodimer including an antigen-binding site which retains much of the antigen recognition and binding capabilities of the native antibody molecule. Inbar et al. (1972) Proc. Nat. Acad. Sci. USA 69:2659-2662; Hochman et al. (1976) Biochem 15:2706-2710; and Ehrlich et al. (1980) Biochem 19:4091-4096.

[0183] A single chain Fv (“sFv”) polypeptide is a covalently linked V_{H}::V_{L} heterodimer which is expressed from a gene fusion including V_{H}- and V_{L}-encoding genes linked by a peptide-encoding linker. Huston et al. (1988) Proc. Nat. Acad. Sci. USA 85(16):5879-5883. A number of methods have been described to discern chemical structures for converting the naturally aggregated—but chemically separated—light and heavy polypeptide chains from an antibody V region into an sFv molecule which will fold into a three dimensional structure substantially similar to the structure of an antigen-binding site. See, e.g., U.S. Pat. Nos. 5,091,513 and 5,132,405, to Huston et al.; and U.S. Pat. No. 4,946,778, to Ladner et al.

[0184] Each of the above-described molecules includes a heavy chain and a light chain CDR set, respectively interposed between a heavy chain and a light chain FR set which provide support to the CDRS and define the spatial relationship of the CDRs relative to each other. As used herein, the term “CDR set” refers to the three hypervariable regions of a heavy or light chain V region. Proceeding from the N-terminus of a heavy or light chain, these regions are denoted as “CDR1,” “CDR2,” and “CDR3” respectively. An antigen-binding site, therefore, includes six CDRs, comprising the CDR set from each of a heavy and a light chain V region. A polypeptide comprising a single CDR, (e.g., a CDR1, CDR2 or CDR3) is referred to herein as a “molecular recognition unit.” Crystallographic analysis of a number of antigen-antibody complexes has demonstrated that the amino acid residues of CDRs form extensive contact with bound antigen, wherein the most extensive antigen contact is with the heavy chain CDR3. Thus, the molecular recognition units are primarily responsible for the specificity of an antigen-binding site.

[0185] As used herein, the term “FR set” refers to the four flanking amino acid sequences which frame the CDRs of a CDR set of a heavy or light chain V region. Some FR residues may contact bound antigen; however, FRs are primarily responsible for folding the V region into the antigen-binding site, particularly the FR residues directly adjacent to the CDRS. Within FRs, certain amino residues and certain structural features are very highly conserved. In this regard, all V region sequences contain an internal disulfide loop of around 90 amino acid residues. When the V regions fold into a binding-site, the CDRs are displayed as projecting loop motifs which form an antigen-binding surface. It is generally recognized that there are conserved structural regions of FRs which influence the folded shape of the CDR loops into certain “canonical” structures—regardless of the precise CDR amino acid sequence. Further, certain FR residues are known to participate in non-covalent interdomain contacts which stabilize the interaction of the antibody heavy and light chains.

[0186] A number of “humanized” antibody molecules comprising an antigen-binding site derived from a non-human immunoglobulin have been described, including chimeric antibodies having rodent V regions and their associated CDRs fused to human constant domains (Winter et al. (1991) Nature 349:293-299; Lobuglio et al. (1989) Proc. Nat. Acad. Sci. USA 86:4220-4224; Shaw et al. (1987) J Immunol. 138:4534-4538; and Brown et al. (1987) Cancer Res. 47:3577-3583), rodent CDRs grafted into a human supporting FR prior to fusion with an appropriate human antibody constant domain (Riechmann et al. (1988) Nature 332:323-327; Verhoeyen et al. (1988) Science 239:1534-1536; and Jones et al. (1986) Nature 321:522-525), and rodent CDRs supported by recombinantly veneered rodent FRs (European Patent Publication No. 519,596, published Dec. 23, 1992). These “humanized” molecules are designed to minimize unwanted immunological response toward rodent antihuman antibody molecules which limits the duration and effectiveness of therapeutic applications of those moieties in human recipients.

[0187] As used herein, the terms “veneered FRs” and “recombinantly veneered FRs” refer to the selective replacement of FR residues from, e.g., a rodent heavy or light chain V region, with human FR residues in order to provide a xenogeneic molecule comprising an antigen-binding site which retains substantially all of the native FR polypeptide folding structure. Veneering techniques are based on the understanding that the ligand binding characteristics of an antigen-binding site are determined primarily by the structure and relative disposition of the heavy and light chain CDR sets within the antigen-binding surface. Davies et al. (1990) Ann. Rev. Biochem. 59:439-473. Thus, antigen binding specificity can be preserved in a humanized antibody only wherein the CDR structures, their interaction with each other, and their interaction with the rest of the V region domains are carefully maintained. By using veneering techniques, exterior (e.g., solvent-accessible) FR residues which are readily encountered by the immune system are selectively replaced with human residues to provide a hybrid molecule that comprises either a weakly immunogenic, or substantially non-immunogenic veneered surface.

[0188] The process of veneering makes use of the available sequence data for human antibody variable domains compiled by Kabat et al., in Sequences of Proteins of Immunological Interest, 4th ed., (U.S. Dept. of Health and Human Services, U.S. Government Printing Office, 1987), updates to the Kabat database, and other accessible U.S. and foreign databases (both nucleic acid and protein). Solvent accessibilities of V region amino acids can be deduced from the known three-dimensional structure for human and murine antibody fragments. There are two general steps in veneering a murine antigen-binding site. Initially, the FRs of the variable domains of an antibody molecule of interest are compared with corresponding FR sequences of human variable domains obtained from the above-identified sources. The most homologous human V regions are then compared residue by residue to corresponding murine amino acids. The residues in the murine FR which differ from the human counterpart are replaced by the residues present in the human moiety using recombinant techniques well known in the art. Residue switching is only carried out with moieties which are at least partially exposed (solvent accessible), and care is exercised in the replacement of amino acid residues which may have a significant effect on the tertiary structure of V region domains, such as proline, glycine and charged amino acids.

[0189] In this manner, the resultant “veneered” murine antigen-binding sites are thus designed to retain the murine CDR residues, the residues substantially adjacent to the CDRs, the residues identified as buried or mostly buried (solvent inaccessible), the residues believed to participate in non-covalent (e.g., electrostatic and hydrophobic) contacts between heavy and light chain domains, and the residues from conserved structural regions of the FRs which are believed to influence the “canonical” tertiary structures of the CDR loops. These design criteria are then used to prepare recombinant nucleotide sequences which combine the CDRs of both the heavy and light chain of a murine antigen-binding site into human-appearing FRs that can be used to transfect mammalian cells for the expression of recombinant human antibodies which exhibit the antigen specificity of the murine antibody molecule.

[0190] In another embodiment of the invention, monoclonal antibodies of the present invention may be coupled to one or more therapeutic agents. Suitable agents in this regard include radionuclides, differentiation inducers, drugs, toxins, and derivatives thereof. Preferred radionuclides include ⁹⁰Y, ¹²³I, ¹²⁵I, ¹³¹I, ¹⁸⁶Re, ¹⁸⁸Re, ²¹¹At, and ²¹²Bi. Preferred drugs include methotrexate, and pyrimidine and purine analogs. Preferred differentiation inducers include phorbol esters and butyric acid. Preferred toxins include ricin, abrin, diptheria toxin, cholera toxin, gelonin, Pseudomonas exotoxin, Shigella toxin, and pokeweed antiviral protein.

[0191] A therapeutic agent may be coupled (e.g., covalently bonded) to a suitable monoclonal antibody either directly or indirectly (e.g., via a linker group). A direct reaction between an agent and an antibody is possible when each possesses a substituent capable of reacting with the other. For example, a nucleophilic group, such as an amino or sulfhydryl group, on one may be capable of reacting with a carbonyl-containing group, such as an anhydride or an acid halide, or with an alkyl group containing a good leaving group (e.g., a halide) on the other.

[0192] Alternatively, it may be desirable to couple a therapeutic agent and an antibody via a linker group. A linker group can function as a spacer to distance an antibody from an agent in order to avoid interference with binding capabilities. A linker group can also serve to increase the chemical reactivity of a substituent on an agent or an antibody, and thus increase the coupling efficiency. An increase in chemical reactivity may also facilitate the use of agents, or functional groups on agents, which otherwise would not be possible.

[0193] It will be evident to those skilled in the art that a variety of bifunctional or polyfunctional reagents, both homo- and hetero-functional (such as those described in the catalog of the Pierce Chemical Co., Rockford, Ill.), may be employed as the linker group. Coupling may be effected, for example, through amino groups, carboxyl groups, sulfhydryl groups or oxidized carbohydrate residues. There are numerous references describing such methodology, e.g., U.S. Pat. No. 4,671,958, to Rodwell et al.

[0194] Where a therapeutic agent is more potent when free from the antibody portion of the immunoconjugates of the present invention, it may be desirable to use a linker group which is cleavable during or upon internalization into a cell. A number of different cleavable linker groups have been described. The mechanisms for the intracellular release of an agent from these linker groups include cleavage by reduction of a disulfide bond (e.g., U.S. Pat. No. 4,489,710, to Spitler), by irradiation of a photolabile bond (e.g., U.S. Pat. No. 4,625,014, to Senter et al.), by hydrolysis of derivatized amino acid side chains (e.g., U.S. Pat. No. 4,638,045, to Kohn et al.), by serum complement-mediated hydrolysis (e.g., U.S. Pat. No. 4,671,958, to Rodwell et al.), and acid-catalyzed hydrolysis (e.g., U.S. Pat. No. 4,569,789, to Blattler et al.).

[0195] It may be desirable to couple more than one agent to an antibody. In one embodiment, multiple molecules of an agent are coupled to one antibody molecule. In another embodiment, more than one type of agent may be coupled to one antibody. Regardless of the particular embodiment, immunoconjugates with more than one agent may be prepared in a variety of ways. For example, more than one agent may be coupled directly to an antibody molecule, or linkers that provide multiple sites for attachment can be used. Alternatively, a carrier can be used.

[0196] A carrier may bear the agents in a variety of ways, including covalent bonding either directly or via a linker group. Suitable carriers include proteins such as albumins (e.g., U.S. Pat. No. 4,507,234, to Kato et al.), peptides and polysaccharides such as aminodextran (e.g., U.S. Pat. No. 4,699,784, to Shih et al.). A carrier may also bear an agent by noncovalent bonding or by encapsulation, such as within a liposome vesicle (e.g., U.S. Pat. Nos. 4,429,008 and 4,873,088). Carriers specific for radionuclide agents include radiohalogenated small molecules and chelating compounds. For example, U.S. Pat. No. 4,735,792 discloses representative radiohalogenated small molecules and their synthesis. A radionuclide chelate may be formed from chelating compounds that include those containing nitrogen and sulfur atoms as the donor atoms for binding the metal, or metal oxide, radionuclide. For example, U.S. Pat. No. 4,673,562, to Davison et al. discloses representative chelating compounds and their synthesis.

[0197] T Cell Compositions

[0198] The present invention, in another aspect, provides T cells specific for a tumor polypeptide disclosed herein, or for a variant or derivative thereof. Such cells may generally be prepared in vitro or ex vivo, using standard procedures. For example, T cells may be isolated from bone marrow, peripheral blood, or a fraction of bone marrow or peripheral blood of a patient, using a commercially available cell separation system, such as the Isolex™ System, available from Nexell Therapeutics, Inc. (Irvine, Calif.; see also U.S. Pat. Nos. 5,240,856; 5,215,926; WO 89/06280; WO 91/16116 and WO 92/07243). Alternatively, T cells may be derived from related or unrelated humans, non-human mammals, cell lines or cultures.

[0199] T cells may be stimulated with a polypeptide, polynucleotide encoding a polypeptide and/or an antigen presenting cell (APC) that expresses such a polypeptide. Such stimulation is performed under conditions and for a time sufficient to permit the generation of T cells that are specific for the polypeptide of interest. Preferably, a tumor polypeptide or polynucleotide of the invention is present within a delivery vehicle, such as a microsphere, to facilitate the generation of specific T cells.

[0200] T cells are considered to be specific for a polypeptide of the present invention if the T cells specifically proliferate, secrete cytokines or kill target cells coated with the polypeptide or expressing a gene encoding the polypeptide. T cell specificity may be evaluated using any of a variety of standard techniques. For example, within a chromium release assay or proliferation assay, a stimulation index of more than two fold increase in lysis and/or proliferation, compared to negative controls, indicates T cell specificity. Such assays may be performed, for example, as described in Chen et al., Cancer Res. 54:1065-1070, 1994. Alternatively, detection of the proliferation of T cells may be accomplished by a variety of known techniques. For example, T cell proliferation can be detected by measuring an increased rate of DNA synthesis (e.g., by pulse-labeling cultures of T cells with tritiated thymidine and measuring the amount of tritiated thymidine incorporated into DNA). Contact with a tumor polypeptide (100 ng/ml-100 μg/ml, preferably 200 ng/ml-25 μg/ml) for 3-7 days will typically result in at least a two fold increase in proliferation of the T cells. Contact as described above for 2-3 hours should result in activation of the T cells, as measured using standard cytokine assays in which a two fold increase in the level of cytokine release (e.g., TNF or IFN-γ) is indicative of T cell activation (see Coligan et al., Current Protocols in Immunology, vol. 1, Wiley Interscience (Greene 1998)). T cells that have been activated in response to a tumor polypeptide, polynucleotide or polypeptide-expressing APC may be CD4⁺ and/or CD8⁺. Tumor polypeptide-specific T cells may be expanded using standard techniques. Within preferred embodiments, the T cells are derived from a patient, a related donor or an unrelated donor, and are administered to the patient following stimulation and expansion.

[0201] For therapeutic purposes, CD4⁺ or CD8⁺ T cells that proliferate in response to a tumor polypeptide, polynucleotide or APC can be expanded in number either in vitro or in vivo. Proliferation of such T cells in vitro may be accomplished in a variety of ways. For example, the T cells can be re-exposed to a tumor polypeptide, or a short peptide corresponding to an immunogenic portion of such a polypeptide, with or without the addition of T cell growth factors, such as interleukin-2, and/or stimulator cells that synthesize a tumor polypeptide. Alternatively, one or more T cells that proliferate in the presence of the tumor polypeptide can be expanded in number by cloning. Methods for cloning cells are well known in the art, and include limiting dilution.

[0202] T Cell Receptor Compositions

[0203] The T cell receptor (TCR) consists of 2 different, highly variable polypeptide chains, termed the T-cell receptor α and β chains, that are linked by a disulfide bond (Janeway, Travers, Walport. Immunobiology. Fourth Ed., 148-159. Elsevier Science Ltd/Garland Publishing. 1999). The α/β heterodimer complexes with the invariant CD3 chains at the cell membrane. This complex recognizes specific antigenic peptides bound to MHC molecules. The enormous diversity of TCR specificities is generated much like immunoglobulin diversity, through somatic gene rearrangement. The β chain genes contain over 50 variable (V), 2 diversity (D), over 10 joining (J) segments, and 2 constant region segments (C). The α chain genes contain over 70 V segments, and over 60 J segments but no D segments, as well as one C segment. During T cell development in the thymus, the D to J gene rearrangement of the β chain occurs, followed by the V gene segment rearrangement to the DJ. This functional VDJ_{β} exon is transcribed and spliced to join to a C_{β}. For the α chain, a V_{α} gene segment rearranges to a J_{α} gene segment to create the functional exon that is then transcribed and spliced to the C_{α}. Diversity is further increased during the recombination process by the random addition of P and N-nucleotides between the V, D, and J segments of the β chain and between the V and J segments in the α chain (Janeway, Travers, Walport. Immunobiology. Fourth Ed., 98 and 150. Elsevier Science Ltd/Garland Publishing. 1999).

[0204] The present invention, in another aspect, provides TCRs specific for a polypeptide disclosed herein, or for a variant or derivative thereof. In accordance with the present invention, polynucleotide and amino acid sequences are provided for the V-J or V-D-J junctional regions or parts thereof for the alpha and beta chains of the T-cell receptor which recognize tumor polypeptides described herein. In general, this aspect of the invention relates to T-cell receptors which recognize or bind tumor polypeptides presented in the context of MHC. In a preferred embodiment the tumor antigens recognized by the T-cell receptors comprise a polypeptide of the present invention. For example, cDNA encoding a TCR specific for a colon tumor peptide can be isolated from T cells specific for a tumor polypeptide using standard molecular biological and recombinant DNA techniques.

[0205] This invention further includes the T-cell receptors or analogs thereof having substantially the same function or activity as the T-cell receptors of this invention which recognize or bind tumor polypeptides. Such receptors include, but are not limited to, a fragment of the receptor, or a substitution, addition or deletion mutant of a T-cell receptor provided herein. This invention also encompasses polypeptides or peptides that are substantially homologous to the T-cell receptors provided herein or that retain substantially the same activity. The term “analog” includes any protein or polypeptide having an amino acid residue sequence substantially identical to the T-cell receptors provided herein in which one or more residues, preferably no more than 5 residues, more preferably no more than 25 residues have been conservatively substituted with a functionally similar residue and which displays the functional aspects of the T-cell receptor as described herein.

[0206] The present invention further provides for suitable mammalian host cells, for example, non-specific T cells, that are transfected with a polynucleotide encoding TCRs specific for a polypeptide described herein, thereby rendering the host cell specific for the polypeptide. The α and β chains of the TCR may be contained on separate expression vectors or alternatively, on a single expression vector that also contains an internal ribosome entry site (IRES) for cap-independent translation of the gene downstream of the IRES. Said host cells expressing TCRs specific for the polypeptide may be used, for example, for adoptive immunotherapy of colon cancer as discussed further below.

[0207] In further aspects of the present invention, cloned TCRs specific for a polypeptide recited herein may be used in a kit for the diagnosis of colon cancer. For example, the nucleic acid sequence or portions thereof, of tumor-specific TCRs can be used as probes or primers for the detection of expression of the rearranged genes encoding the specific TCR in a biological sample. Therefore, the present invention further provides for an assay for detecting messenger RNA or DNA encoding the TCR specific for a polypeptide.

[0208] Pharmaceutical Compositions

[0209] In additional embodiments, the present invention concerns formulation of one or more of the polynucleotide, polypeptide, T-cell, TCR, and/or antibody compositions disclosed herein in pharmaceutically-acceptable carriers for administration to a cell or an animal, either alone, or in combination with one or more other modalities of therapy.

[0210] It will be understood that, if desired, a composition as disclosed herein may be administered in combination with other agents as well, such as, e.g., other proteins or polypeptides or various pharmaceutically-active agents. In fact, there is virtually no limit to other components that may also be included, given that the additional agents do not cause a significant adverse effect upon contact with the target cells or host tissues. The compositions may thus be delivered along with various other agents as required in the particular instance. Such compositions may be purified from host cells or other biological sources, or alternatively may be chemically synthesized as described herein. Likewise, such compositions may further comprise substituted or derivatized RNA or DNA compositions.

[0211] Therefore, in another aspect of the present invention, pharmaceutical compositions are provided comprising one or more of the polynucleotide, polypeptide, antibody, TCR, and/or T-cell compositions described herein in combination with a physiologically acceptable carrier. In certain preferred embodiments, the pharmaceutical compositions of the invention comprise immunogenic polynucleotide and/or polypeptide compositions of the invention for use in prophylactic and theraputic vaccine applications. Vaccine preparation is generally described in, for example, M. F. Powell and M. J. Newman, eds., “Vaccine Design (the subunit and adjuvant approach),” Plenum Press (NY, 1995). Generally, such compositions will comprise one or more polynucleotide and/or polypeptide compositions of the present invention in combination with one or more immunostimulants.

[0212] It will be apparent that any of the pharmaceutical compositions described herein can contain pharmaceutically acceptable salts of the polynucleotides and polypeptides of the invention. Such salts can be prepared, for example, from pharmaceutically acceptable non-toxic bases, including organic bases (e.g., salts of primary, secondary and tertiary amines and basic amino acids) and inorganic bases (e.g., sodium, potassium, lithium, ammonium, calcium and magnesium salts).

[0213] In another embodiment, illustrative immunogenic compositions, e.g., vaccine compositions, of the present invention comprise DNA encoding one or more of the polypeptides as described above, such that the polypeptide is generated in situ. As noted above, the polynucleotide may be administered within any of a variety of delivery systems known to those of ordinary skill in the art. Indeed, numerous gene delivery techniques are well known in the art, such as those described by Rolland, Crit. Rev. Therap. Drug Carrier Systems 15:143-198, 1998, and references cited therein. Appropriate polynucleotide expression systems will, of course, contain the necessary regulatory DNA regulatory sequences for expression in a patient (such as a suitable promoter and terminating signal). Alternatively, bacterial delivery systems may involve the administration of a bacterium (such as Bacillus-Calmette-Guerrin) that expresses an immunogenic portion of the polypeptide on its cell surface or secretes such an epitope.

[0214] Therefore, in certain embodiments, polynucleotides encoding immunogenic polypeptides described herein are introduced into suitable mammalian host cells for expression using any of a number of known viral-based systems. In one illustrative embodiment, retroviruses provide a convenient and effective platform for gene delivery systems. A selected nucleotide sequence encoding a polypeptide of the present invention can be inserted into a vector and packaged in retroviral particles using techniques known in the art. The recombinant virus can then be isolated and delivered to a subject. A number of illustrative retroviral systems have been described (e.g., U.S. Pat. No. 5,219,740; Miller and Rosman (1989) BioTechniques 7:980-990; Miller, A. D. (1990) Human Gene Therapy 1:5-14; Scarpa et al. (1991) Virology 180:849-852; Burns et al. (1993) Proc. Natl. Acad. Sci. USA 90:8033-8037; and Boris-Lawrie and Temin (1993) Cur. Opin. Genet. Develop. 3:102-109.

[0215] In addition, a number of illustrative adenovirus-based systems have also been described. Unlike retroviruses which integrate into the host genome, adenoviruses persist extrachromosomally thus minimizing the risks associated with insertional mutagenesis (Haj-Ahmad and Graham (1986) J. Virol. 57:267-274; Bett et al. (1993) J. Virol. 67:5911-5921; Mittereder et al. (1994) Human Gene Therapy 5:717-729; Seth et al. (1994) J. Virol. 68:933-940; Barr et al. (1994) Gene Therapy 1:51-58; Berkner, K. L. (1988) BioTechniques 6:616-629; and Rich et al. (1993) Human Gene Therapy 4:461-476).

[0216] Various adeno-associated virus (AAV) vector systems have also been developed for polynucleotide delivery. AAV vectors can be readily constructed using techniques well known in the art. See, e.g., U.S. Pat. Nos. 5,173,414 and 5,139,941; International Publication Nos. WO 92/01070 and WO 93/03769; Lebkowski et al. (1988) Molec. Cell. Biol. 8:3988-3996; Vincent et al. (1990) Vaccines 90 (Cold Spring Harbor Laboratory Press); Carter, B. J. (1992) Current Opinion in Biotechnology 3:533-539; Muzyczka, N. (1992) Current Topics in Microbiol. and Immunol. 158:97-129; Kotin, R. M. (1994) Human Gene Therapy 5:793-801; Shelling and Smith (1994) Gene Therapy 1:165-169; and Zhou et al. (1994) J. Exp. Med. 179:1867-1875.

[0217] Additional viral vectors useful for delivering the polynucleotides encoding polypeptides of the present invention by gene transfer include those derived from the pox family of viruses, such as vaccinia virus and avian poxvirus. By way of example, vaccinia virus recombinants expressing the novel molecules can be constructed as follows. The DNA encoding a polypeptide is first inserted into an appropriate vector so that it is adjacent to a vaccinia promoter and flanking vaccinia DNA sequences, such as the sequence encoding thymidine kinase (TK). This vector is then used to transfect cells which are simultaneously infected with vaccinia. Homologous recombination serves to insert the vaccinia promoter plus the gene encoding the polypeptide of interest into the viral genome. The resulting TK.sup.(−) recombinant can be selected by culturing the cells in the presence of 5-bromodeoxyuridine and picking viral plaques resistant thereto.

[0218] A vaccinia-based infection/transfection system can be conveniently used to provide for inducible, transient expression or coexpression of one or more polypeptides described herein in host cells of an organism. In this particular system, cells are first infected in vitro with a vaccinia virus recombinant that encodes the bacteriophage T7 RNA polymerase. This polymerase displays exquisite specificity in that it only transcribes templates bearing T7 promoters. Following infection, cells are transfected with the polynucleotide or polynucleotides of interest, driven by a T7 promoter. The polymerase expressed in the cytoplasm from the vaccinia virus recombinant transcribes the transfected DNA into RNA which is then translated into polypeptide by the host translational machinery. The method provides for high level, transient, cytoplasmic production of large quantities of RNA and its translation products. See, e.g., Elroy-Stein and Moss, Proc. Natl. Acad. Sci. USA (1990) 87:6743-6747; Fuerst et al. Proc. Natl. Acad. Sci. USA (1986) 83:8122-8126.

[0219] Alternatively, avipoxviruses, such as the fowlpox and canarypox viruses, can also be used to deliver the coding sequences of interest. Recombinant avipox viruses, expressing immunogens from mammalian pathogens, are known to confer protective immunity when administered to non-avian species. The use of an Avipox vector is particularly desirable in human and other mammalian species since members of the Avipox genus can only productively replicate in susceptible avian species and therefore are not infective in mammalian cells. Methods for producing recombinant Avipoxviruses are known in the art and employ genetic recombination, as described above with respect to the production of vaccinia viruses. See, e.g., WO 91/12882; WO 89/03429; and WO 92/03545.

[0220] Any of a number of alphavirus vectors can also be used for delivery of polynucleotide compositions of the present invention, such as those vectors described in U.S. Pat. Nos. 5,843,723; 6,015,686; 6,008,035 and 6,015,694. Certain vectors based on Venezuelan Equine Encephalitis (VEE) can also be used, illustrative examples of which can be found in U.S. Pat. Nos. 5,505,947 and 5,643,576.

[0221] Moreover, molecular conjugate vectors, such as the adenovirus chimeric vectors described in Michael et al. J. Biol. Chem. (1993) 268:6866-6869 and Wagner et al. Proc. Natl. Acad. Sci. USA (1992) 89:6099-6103, can also be used for gene delivery under the invention.

[0222] Additional illustrative information on these and other known viral-based delivery systems can be found, for example, in Fisher-Hoch et al., Proc. Natl. Acad. Sci. USA 86:317-321, 1989; Flexner et al., Ann. N.Y. Acad. Sci. 569:86-103, 1989; Flexner et al., Vaccine 8:17-21, 1990; U.S. Pat. Nos. 4,603,112, 4,769,330, and 5,017,487; WO 89/01973; U.S. Pat. No. 4,777,127; GB 2,200,651; EP 0,345,242; WO 91/02805; Berkner, Biotechniques 6:616-627, 1988; Rosenfeld et al., Science 252:431-434, 1991; Kolls et al., Proc. Natl. Acad. Sci. USA 91:215-219, 1994; Kass-Eisler et al., Proc. Natl. Acad. Sci. USA 90:11498-11502, 1993; Guzman et al., Circulation 88:2838-2848, 1993; and Guzman et al., Cir. Res. 73:1202-1207, 1993.

[0223] In certain embodiments, a polynucleotide may be integrated into the genome of a target cell. This integration may be in the specific location and orientation via homologous recombination (gene replacement) or it may be integrated in a random, non-specific location (gene augmentation). In yet further embodiments, the polynucleotide may be stably maintained in the cell as a separate, episomal segment of DNA. Such polynucleotide segments or “episomes” encode sequences sufficient to permit maintenance and replication independent of or in synchronization with the host cell cycle. The manner in which the expression construct is delivered to a cell and where in the cell the polynucleotide remains is dependent on the type of expression construct employed.

[0224] In another embodiment of the invention, a polynucleotide is administered/delivered as “naked” DNA, for example as described in Ulmer et al., Science 259:1745-1749, 1993 and reviewed by Cohen, Science 259:1691-1692, 1993. The uptake of naked DNA may be increased by coating the DNA onto biodegradable beads, which are efficiently transported into the cells.

[0225] In still another embodiment, a composition of the present invention can be delivered via a particle bombardment approach, many of which have been described. In one illustrative example, gas-driven particle acceleration can be achieved with devices such as those manufactured by Powderject Pharmaceuticals PLC (Oxford, UK) and Powderject Vaccines Inc. (Madison, Wis.), some examples of which are described in U.S. Pat. Nos. 5,846,796; 6,010,478; 5,865,796; 5,584,807; and EP Patent No. 0500 799. This approach offers a needle-free delivery approach wherein a dry powder formulation of microscopic particles, such as polynucleotide or polypeptide particles, are accelerated to high speed within a helium gas jet generated by a hand held device, propelling the particles into a target tissue of interest.

[0226] In a related embodiment, other devices and methods that may be useful for gas-driven needle-less injection of compositions of the present invention include those provided by Bioject, Inc. (Portland, Oreg.), some examples of which are described in U.S. Pat. Nos. 4,790,824; 5,064,413; 5,312,335; 5,383,851; 5,399,163; 5,520,639 and 5,993,412.

[0227] According to another embodiment, the pharmaceutical compositions described herein will comprise one or more immunostimulants in addition to the immunogenic polynucleotide, polypeptide, antibody, T-cell, TCR, and/or APC compositions of this invention. An immunostimulant refers to essentially any substance that enhances or potentiates an immune response (antibody and/or cell-mediated) to an exogenous antigen. One preferred type of immunostimulant comprises an adjuvant. Many adjuvants contain a substance designed to protect the antigen from rapid catabolism, such as aluminum hydroxide or mineral oil, and a stimulator of immune responses, such as lipid A, Bortadella pertussis or Mycobacterium tuberculosis derived proteins. Certain adjuvants are commercially available as, for example, Freund's Incomplete Adjuvant and Complete Adjuvant (Difco Laboratories, Detroit, Mich.); Merck Adjuvant 65 (Merck and Company, Inc., Rahway, N.J.); AS-2 (SmithKline Beecham, Philadelphia, Pa.); aluminum salts such as aluminum hydroxide gel (alum) or aluminum phosphate; salts of calcium, iron or zinc; an insoluble suspension of acylated tyrosine; acylated sugars; cationically or anionically derivatized polysaccharides; polyphosphazenes; biodegradable microspheres; monophosphoryl lipid A and quil A. Cytokines, such as GM-CSF, interleukin-2, -7, -12, and other like growth factors, may also be used as adjuvants.

[0228] Within certain embodiments of the invention, the adjuvant composition is preferably one that induces an immune response predominantly of the Th1 type. High levels of Th1-type cytokines (e.g., IFN-γ, TNFα, IL-2 and IL-12) tend to favor the induction of cell mediated immune responses to an administered antigen. In contrast, high levels of Th2-type cytokines (e.g., IL-4, IL-5, IL-6 and IL-10) tend to favor the induction of humoral immune responses. Following application of a vaccine as provided herein, a patient will support an immune response that includes Th1- and Th2-type responses. Within a preferred embodiment, in which a response is predominantly Th1-type, the level of Th1-type cytokines will increase to a greater extent than the level of Th2-type cytokines. The levels of these cytokines may be readily assessed using standard assays. For a review of the families of cytokines, see Mosmann and Coffman, Ann. Rev. Immunol. 7:145-173, 1989.

[0229] Certain preferred adjuvants for eliciting a predominantly Th1-type response include, for example, a combination of monophosphoryl lipid A, preferably 3-de-O-acylated monophosphoryl lipid A, together with an aluminum salt. MPL® adjuvants are available from Corixa Corporation (Seattle, Wash.; see, for example, U.S. Pat. Nos. 4,436,727; 4,877,611; 4,866,034 and 4,912,094). CpG-containing oligonucleotides (in which the CpG dinucleotide is unmethylated) also induce a predominantly Th1 response. Such oligonucleotides are well known and are described, for example, in WO 96/02555, WO 99/33488 and U.S. Pat. Nos. 6,008,200 and 5,856,462. Immunostimulatory DNA sequences are also described, for example, by Sato et al., Science 273:352, 1996. Another preferred adjuvant comprises a saponin, such as Quil A, or derivatives thereof, including QS21 and QS7 (Aquila Biopharmaceuticals Inc., Framingham, Mass.); Escin; Digitonin; or Gypsophila or Chenopodium quinoa saponins . Other preferred formulations include more than one saponin in the adjuvant combinations of the present invention, for example combinations of at least two of the following group comprising QS21, QS7, Quil A, β-escin, or digitonin.

[0230] Alternatively the saponin formulations may be combined with vaccine vehicles composed of chitosan or other polycationic polymers, polylactide and polylactide-co-glycolide particles, poly-N-acetyl glucosamine-based polymer matrix, particles composed of polysaccharides or chemically modified polysaccharides, liposomes and lipid-based particles, particles composed of glycerol monoesters, etc. The saponins may also be formulated in the presence of cholesterol to form particulate structures such as liposomes or ISCOMs. Furthermore, the saponins may be formulated together with a polyoxyethylene ether or ester, in either a non-particulate solution or suspension, or in a particulate structure such as a paucilamelar liposome or ISCOM. The saponins may also be formulated with excipients such as Carbopol^{R} to increase viscosity, or may be formulated in a dry powder form with a powder excipient such as lactose.

[0231] In one preferred embodiment, the adjuvant system includes the combination of a monophosphoryl lipid A and a saponin derivative, such as the combination of QS21 and 3D-MPL® adjuvant, as described in WO 94/00153, or a less reactogenic composition where the QS21 is quenched with cholesterol, as described in WO 96/33739. Other preferred formulations comprise an oil-in-water emulsion and tocopherol. Another particularly preferred adjuvant formulation employing QS21, 3D-MPL® adjuvant and tocopherol in an oil-in-water emulsion is described in WO 95/17210.

[0232] Another enhanced adjuvant system involves the combination of a CpG-containing oligonucleotide and a saponin derivative particularly the combination of CpG and QS21 is disclosed in WO 00/09159. Preferably the formulation additionally comprises an oil in water emulsion and tocopherol.

[0233] Additional illustrative adjuvants for use in the pharmaceutical compositions of the invention include Montanide ISA 720 (Seppic, France), SAF (Chiron, Calif., United States), ISCOMS (CSL), MF-59 (Chiron), the SBAS series of adjuvants (e.g., SBAS-2 or SBAS-4, available from SmithKline Beecham, Rixensart, Belgium), Detox (Enhanzyn®) (Corixa, Hamilton, Mont.), RC-529 (Corixa, Hamilton, Mont.) and other aminoalkyl glucosaminide 4-phosphates (AGPs), such as those described in pending U.S. patent application Ser. Nos. 08/853,826 and 09/074,720, the disclosures of which are incorporated herein by reference in their entireties, and polyoxyethylene ether adjuvants such as those described in WO 99/52549A1.

[0234] Other preferred adjuvants include adjuvant molecules of the general formula (I).

HO(CH₂CH₂O)ₙ—A—R,

[0235] wherein, n is 1-50, A is a bond or —C(O)—, R is C₁₋₅₀ alkyl or Phenyl C₁₋₅₀ alkyl.

[0236] One embodiment of the present invention consists of a vaccine formulation comprising a polyoxyethylene ether of general formula (I), wherein n is between 1 and 50, preferably 4-24, most preferably 9; the R component is C₁₋₅₀, preferably C₄-C₂₀ alkyl and most preferably C₁₂ alkyl, and A is a bond. The concentration of the polyoxyethylene ethers should be in the range 0.1-20%, preferably from 0.1-10%, and most preferably in the range 0.1-1%. Preferred polyoxyethylene ethers are selected from the following group: polyoxyethylene-9-lauryl ether, polyoxyethylene-9-steoryl ether, polyoxyethylene-8-steoryl ether, polyoxyethylene-4-lauryl ether, polyoxyethylene-35-lauryl ether, and polyoxyethylene-23-lauryl ether. Polyoxyethylene ethers such as polyoxyethylene lauryl ether are described in the Merck index (12^{th} edition: entry 7717). These adjuvant molecules are described in WO 99/52549.

[0237] The polyoxyethylene ether according to the general formula (I) above may, if desired, be combined with another adjuvant. For example, a preferred adjuvant combination is preferably with CpG as described in the pending UK patent application GB 9820956.2.

[0238] According to another embodiment of this invention, an immunogenic composition described herein is delivered to a host via antigen presenting cells (APCs), such as dendritic cells, macrophages, B cells, monocytes and other cells that may be engineered to be efficient APCs. Such cells may, but need not, be genetically modified to increase the capacity for presenting the antigen, to improve activation and/or maintenance of the T cell response, to have anti-tumor effects per se and/or to be immunologically compatible with the receiver (i.e., matched HLA haplotype). APCs may generally be isolated from any of a variety of biological fluids and organs, including tumor and peritumoral tissues, and may be autologous, allogeneic, syngeneic or xenogeneic cells.

[0239] Certain preferred embodiments of the present invention use dendritic cells or progenitors thereof as antigen-presenting cells. Dendritic cells are highly potent APCs (Banchereau and Steinman, Nature 392:245-251, 1998) and have been shown to be effective as a physiological adjuvant for eliciting prophylactic or therapeutic antitumor immunity (see Timmerman and Levy, Ann. Rev. Med. 50:507-529, 1999). In general, dendritic cells may be identified based on their typical shape (stellate in situ, with marked cytoplasmic processes (dendrites) visible in vitro), their ability to take up, process and present antigens with high efficiency and their ability to activate naive T cell responses. Dendritic cells may, of course, be engineered to express specific cell-surface receptors or ligands that are not commonly found on dendritic cells in vivo or ex vivo, and such modified dendritic cells are contemplated by the present invention. As an alternative to dendritic cells, secreted vesicles antigen-loaded dendritic cells (called exosomes) may be used within a vaccine (see Zitvogel et al., Nature Med. 4:594-600, 1998).

[0240] Dendritic cells and progenitors may be obtained from peripheral blood, bone marrow, tumor-infiltrating cells, peritumoral tissues-infiltrating cells, lymph nodes, spleen, skin, umbilical cord blood or any other suitable tissue or fluid. For example, dendritic cells may be differentiated ex vivo by adding a combination of cytokines such as GM-CSF, IL-4, IL-13 and/or TNFα to cultures of monocytes harvested from peripheral blood. Alternatively, CD34 positive cells harvested from peripheral blood, umbilical cord blood or bone marrow may be differentiated into dendritic cells by adding to the culture medium combinations of GM-CSF, IL-3, TNFα, CD40 ligand, LPS, flt3 ligand and/or other compound(s) that induce differentiation, maturation and proliferation of dendritic cells.

[0241] Dendritic cells are conveniently categorized as “immature” and “mature” cells, which allows a simple way to discriminate between two well characterized phenotypes. However, this nomenclature should not be construed to exclude all possible intermediate stages of differentiation. Immature dendritic cells are characterized as APC with a high capacity for antigen uptake and processing, which correlates with the high expression of Fcγ receptor and mannose receptor. The mature phenotype is typically characterized by a lower expression of these markers, but a high expression of cell surface molecules responsible for T cell activation such as class I and class II MHC, adhesion molecules (e.g., CD54 and CD11) and costimulatory molecules (e.g., CD40, CD80, CD86 and 4-1BB).

[0242] APCs may generally be transfected with a polynucleotide of the invention (or portion or other variant thereof) such that the encoded polypeptide, or an immunogenic portion thereof, is expressed on the cell surface. Such transfection may take place ex vivo, and a pharmaceutical composition comprising such transfected cells may then be used for therapeutic purposes, as described herein. Alternatively, a gene delivery vehicle that targets a dendritic or other antigen presenting cell may be administered to a patient, resulting in transfection that occurs in vivo. In vivo and ex vivo transfection of dendritic cells, for example, may generally be performed using any methods known in the art, such as those described in WO 97/24447, or the gene gun approach described by Mahvi et al., Immunology and cell Biology 75:456-460, 1997. Antigen loading of dendritic cells may be achieved by incubating dendritic cells or progenitor cells with the tumor polypeptide, DNA (naked or within a plasmid vector) or RNA; or with antigen-expressing recombinant bacterium or viruses (e.g., vaccinia, fowlpox, adenovirus or lentivirus vectors). Prior to loading, the polypeptide may be covalently conjugated to an immunological partner that provides T cell help (e.g., a carrier molecule). Alternatively, a dendritic cell may be pulsed with a non-conjugated immunological partner, separately or in the presence of the polypeptide.

[0243] While any suitable carrier known to those of ordinary skill in the art may be employed in the pharmaceutical compositions of this invention, the type of carrier will typically vary depending on the mode of administration. Compositions of the present invention may be formulated for any appropriate manner of administration, including for example, topical, oral, nasal, mucosal, intravenous, intracranial, intraperitoneal, subcutaneous and intramuscular administration.

[0244] Carriers for use within such pharmaceutical compositions are biocompatible, and may also be biodegradable. In certain embodiments, the formulation preferably provides a relatively constant level of active component release. In other embodiments, however, a more rapid rate of release immediately upon administration may be desired. The formulation of such compositions is well within the level of ordinary skill in the art using known techniques. Illustrative carriers useful in this regard include microparticles of poly(lactide-co-glycolide), polyacrylate, latex, starch, cellulose, dextran and the like. Other illustrative delayed-release carriers include supramolecular biovectors, which comprise a non-liquid hydrophilic core (e.g., a cross-linked polysaccharide or oligosaccharide) and, optionally, an external layer comprising an amphiphilic compound, such as a phospholipid (see e.g., U.S. Pat. No. 5,151,254 and PCT applications WO 94/20078, WO/94/23701 and WO 96/06638). The amount of active compound contained within a sustained release formulation depends upon the site of implantation, the rate and expected duration of release and the nature of the condition to be treated or prevented.

[0245] In another illustrative embodiment, biodegradable microspheres (e.g., polylactate polyglycolate) are employed as carriers for the compositions of this invention. Suitable biodegradable microspheres are disclosed, for example, in U.S. Pat. Nos. 4,897,268; 5,075,109; 5,928,647; 5,811,128; 5,820,883; 5,853,763; 5,814,344, 5,407,609 and 5,942,252. Modified hepatitis B core protein carrier systems. such as described in WO/99 40934, and references cited therein, will also be useful for many applications. Another illustrative carrier/delivery system employs a carrier comprising particulate-protein complexes, such as those described in U.S. Pat. No. 5,928,647, which are capable of inducing a class I-restricted cytotoxic T lymphocyte responses in a host.

[0246] In another illustrative embodiment, calcium phosphate core particles are employed as carriers, vaccine adjuvants, or as controlled release matrices for the compositions of this invention. Exemplary calcium phosphate particles are disclosed, for example, in published patent application No. WO/0046147.

[0247] The pharmaceutical compositions of the invention will often further comprise one or more buffers (e.g., neutral buffered saline or phosphate buffered saline), carbohydrates (e.g., glucose, mannose, sucrose or dextrans), mannitol, proteins, polypeptides or amino acids such as glycine, antioxidants, bacteriostats, chelating agents such as EDTA or glutathione, adjuvants (e.g., aluminum hydroxide), solutes that render the formulation isotonic, hypotonic or weakly hypertonic with the blood of a recipient, suspending agents, thickening agents and/or preservatives. Alternatively, compositions of the present invention may be formulated as a lyophilizate.

[0248] The pharmaceutical compositions described herein may be presented in unit-dose or multi-dose containers, such as sealed ampoules or vials. Such containers are typically sealed in such a way to preserve the sterility and stability of the formulation until use. In general, formulations may be stored as suspensions, solutions or emulsions in oily or aqueous vehicles. Alternatively, a pharmaceutical composition may be stored in a freeze-dried condition requiring only the addition of a sterile liquid carrier immediately prior to use.

[0249] The development of suitable dosing and treatment regimens for using the particular compositions described herein in a variety of treatment regimens, including e.g., oral, parenteral, intravenous, intranasal, and intramuscular administration and formulation, is well known in the art, some of which are briefly discussed below for general purposes of illustration.

[0250] In certain applications, the pharmaceutical compositions disclosed herein may be delivered via oral administration to an animal. As such, these compositions may be formulated with an inert diluent or with an assimilable edible carrier, or they may be enclosed in hard- or soft-shell gelatin capsule, or they may be compressed into tablets, or they may be incorporated directly with the food of the diet.

[0251] The active compounds may even be incorporated with excipients and used in the form of ingestible tablets, buccal tables, troches, capsules, elixirs, suspensions, syrups, wafers, and the like (see, for example, Mathiowitz et al., Nature Mar. 27, 1997;386(6623):410-4; Hwang et al., Crit Rev Ther Drug Carrier Syst 1998;15(3):243-84; U.S. Pat. Nos. 5,641,515; 5,580,579 and 5,792,451). Tablets, troches, pills, capsules and the like may also contain any of a variety of additional components, for example, a binder, such as gum tragacanth, acacia, cornstarch, or gelatin; excipients, such as dicalcium phosphate; a disintegrating agent, such as corn starch, potato starch, alginic acid and the like; a lubricant, such as magnesium stearate; and a sweetening agent, such as sucrose, lactose or saccharin may be added or a flavoring agent, such as peppermint, oil of wintergreen, or cherry flavoring. When the dosage unit form is a capsule, it may contain, in addition to materials of the above type, a liquid carrier. Various other materials may be present as coatings or to otherwise modify the physical form of the dosage unit. For instance, tablets, pills, or capsules may be coated with shellac, sugar, or both. Of course, any material used in preparing any dosage unit form should be pharmaceutically pure and substantially non-toxic in the amounts employed. In addition, the active compounds may be incorporated into sustained-release preparation and formulations.

[0252] Typically, these formulations will contain at least about 0.1% of the active compound or more, although the percentage of the active ingredient(s) may, of course, be varied and may conveniently be between about 1 or 2% and about 60% or 70% or more of the weight or volume of the total formulation. Naturally, the amount of active compound(s) in each therapeutically useful composition may be prepared is such a way that a suitable dosage will be obtained in any given unit dose of the compound. Factors such as solubility, bioavailability, biological half-life, route of administration, product shelf life, as well as other pharmacological considerations will be contemplated by one skilled in the art of preparing such pharmaceutical formulations, and as such, a variety of dosages and treatment regimens may be desirable.

[0253] For oral administration the compositions of the present invention may alternatively be incorporated with one or more excipients in the form of a mouthwash, dentifrice, buccal tablet, oral spray, or sublingual orally-administered formulation. Alternatively, the active ingredient may be incorporated into an oral solution such as one containing sodium borate, glycerin and potassium bicarbonate, or dispersed in a dentifrice, or added in a therapeutically-effective amount to a composition that may include water, binders, abrasives, flavoring agents, foaming agents, and humectants. Alternatively the compositions may be fashioned into a tablet or solution form that may be placed under the tongue or otherwise dissolved in the mouth.

[0254] In certain circumstances it will be desirable to deliver the pharmaceutical compositions disclosed herein parenterally, intravenously, intramuscularly, or even intraperitoneally. Such approaches are well known to the skilled artisan, some of which are further described, for example, in U.S. Pat. Nos. 5,543,158; 5,641,515 and 5,399,363. In certain embodiments, solutions of the active compounds as free base or pharmacologically acceptable salts may be prepared in water suitably mixed with a surfactant, such as hydroxypropylcellulose. Dispersions may also be prepared in glycerol, liquid polyethylene glycols, and mixtures thereof and in oils. Under ordinary conditions of storage and use, these preparations generally will contain a preservative to prevent the growth of microorganisms.

[0255] Illustrative pharmaceutical forms suitable for injectable use include sterile aqueous solutions or dispersions and sterile powders for the extemporaneous preparation of sterile injectable solutions or dispersions (for example, see U.S. Pat. No. 5,466,468). In all cases the form must be sterile and must be fluid to the extent that easy syringability exists. It must be stable under the conditions of manufacture and storage and must be preserved against the contaminating action of microorganisms, such as bacteria and fungi. The carrier can be a solvent or dispersion medium containing, for example, water, ethanol, polyol (e.g., glycerol, propylene glycol, and liquid polyethylene glycol, and the like), suitable mixtures thereof, and/or vegetable oils. Proper fluidity may be maintained, for example, by the use of a coating, such as lecithin, by the maintenance of the required particle size in the case of dispersion and/or by the use of surfactants. The prevention of the action of microorganisms can be facilitated by various antibacterial and antifungal agents, for example, parabens, chlorobutanol, phenol, sorbic acid, thimerosal, and the like. In many cases, it will be preferable to include isotonic agents, for example, sugars or sodium chloride. Prolonged absorption of the injectable compositions can be brought about by the use in the compositions of agents delaying absorption, for example, aluminum monostearate and gelatin.

[0256] In one embodiment, for parenteral administration in an aqueous solution, the solution should be suitably buffered if necessary and the liquid diluent first rendered isotonic with sufficient saline or glucose. These particular aqueous solutions are especially suitable for intravenous, intramuscular, subcutaneous and intraperitoneal administration. In this connection, a sterile aqueous medium that can be employed will be known to those of skill in the art in light of the present disclosure. For example, one dosage may be dissolved in 1 ml of isotonic NaCl solution and either added to 1000 ml of hypodermoclysis fluid or injected at the proposed site of infusion, (see for example, “Remington's Pharmaceutical Sciences” 15th Edition, pages 1035-1038 and 1570-1580). Some variation in dosage will necessarily occur depending on the condition of the subject being treated. Moreover, for human administration, preparations will of course preferably meet sterility, pyrogenicity, and the general safety and purity standards as required by FDA Office of Biologics standards.

[0257] In another embodiment of the invention, the compositions disclosed herein may be formulated in a neutral or salt form. Illustrative pharmaceutically-acceptable salts include the acid addition salts (formed with the free amino groups of the protein) and which are formed with inorganic acids such as, for example, hydrochloric or phosphoric acids, or such organic acids as acetic, oxalic, tartaric, mandelic, and the like. Salts formed with the free carboxyl groups can also be derived from inorganic bases such as, for example, sodium, potassium, ammonium, calcium, or ferric hydroxides, and such organic bases as isopropylamine, trimethylamine, histidine, procaine and the like. Upon formulation, solutions will be administered in a manner compatible with the dosage formulation and in such amount as is therapeutically effective.

[0258] The carriers can further comprise any and all solvents, dispersion media, vehicles, coatings, diluents, antibacterial and antifungal agents, isotonic and absorption delaying agents, buffers, carrier solutions, suspensions, colloids, and the like. The use of such media and agents for pharmaceutical active substances is well known in the art. Except insofar as any conventional media or agent is incompatible with the active ingredient, its use in the therapeutic compositions is contemplated. Supplementary active ingredients can also be incorporated into the compositions. The phrase “pharmaceutically-acceptable” refers to molecular entities and compositions that do not produce an allergic or similar untoward reaction when administered to a human.

[0259] In certain embodiments, the pharmaceutical compositions may be delivered by intranasal sprays, inhalation, and/or other aerosol delivery vehicles. Methods for delivering genes, nucleic acids, and peptide compositions directly to the lungs via nasal aerosol sprays has been described, e.g., in U.S. Pat. Nos. 5,756,353 and 5,804,212. Likewise, the delivery of drugs using intranasal microparticle resins (Takenaga et al., J Controlled Release Mar. 2, 1998;52(1-2):81-7) and lysophosphatidyl-glycerol compounds (U.S. Pat. No. 5,725,871) are also well-known in the pharmaceutical arts. Likewise, illustrative transmucosal drug delivery in the form of a polytetrafluoroetheylene support matrix is described in U.S. Pat. No. 5,780,045.

[0260] In certain embodiments, liposomes, nanocapsules, microparticles, lipid particles, vesicles, and the like, are used for the introduction of the compositions of the present invention into suitable host cells/organisms. In particular, the compositions of the present invention may be formulated for delivery either encapsulated in a lipid particle, a liposome, a vesicle, a nanosphere, or a nanoparticle or the like. Alternatively, compositions of the present invention can be bound, either covalently or non-covalently, to the surface of such carrier vehicles.

[0261] The formation and use of liposome and liposome-like preparations as potential drug carriers is generally known to those of skill in the art (see for example, Lasic, Trends Biotechnol July 1998;16(7):307-21; Takakura, Nippon Rinsho March 1998;56(3):691-5; Chandran et al., Indian J Exp Biol. August 1997;35(8):801-9; Margalit, Crit Rev Ther Drug Carrier Syst. 1995;12(2-3):233-61; U.S. Pat. Nos. 5,567,434; 5,552,157; 5,565,213; 5,738,868 and 5,795,587, each specifically incorporated herein by reference in its entirety).

[0262] Liposomes have been used successfully with a number of cell types that are normally difficult to transfect by other procedures, including T cell suspensions, primary hepatocyte cultures and PC 12 cells (Renneisen et al., J Biol Chem. Sep. 25, 1990;265(27):16337-42; Muller et al., DNA Cell Biol. April 1990;9(3):221-9). In addition, liposomes are free of the DNA length constraints that are typical of viral-based delivery systems. Liposomes have been used effectively to introduce genes, various drugs, radiotherapeutic agents, enzymes, viruses, transcription factors, allosteric effectors and the like, into a variety of cultured cell lines and animals. Furthermore, he use of liposomes does not appear to be associated with autoimmune responses or unacceptable toxicity after systemic delivery.

[0263] In certain embodiments, liposomes are formed from phospholipids that are dispersed in an aqueous medium and spontaneously form multilamellar concentric bilayer vesicles (also termed multilamellar vesicles (MLVs).

[0264] Alternatively, in other embodiments, the invention provides for pharmaceutically-acceptable nanocapsule formulations of the compositions of the present invention. Nanocapsules can generally entrap compounds in a stable and reproducible way (see, for example, Quintanar-Guerrero et al., Drug Dev Ind Pharm. December 1998;24(12):1113-28). To avoid side effects due to intracellular polymeric overloading, such ultrafine particles (sized around 0.1 μm) may be designed using polymers able to be degraded in vivo. Such particles can be made as described, for example, by Couvreur et al., Crit Rev Ther Drug Carrier Syst. 1988;5(1):1-20; zur Muhlen et al., Eur J Pharm Biopharm. March 1998;45(2):149-55; Zambaux et al. J Controlled Release. Jan. 2, 1998;50(1-3):31-40; and U.S. Pat. No. 5,145,684.

[0265] Cancer Therapeutic Methods

[0266] Immunologic approaches to cancer therapy are based on the recognition that cancer cells can often evade the body's defenses against aberrant or foreign cells and molecules, and that these defenses might be therapeutically stimulated to regain the lost ground, e.g. pgs. 623-648 in Klein, Immunology (Wiley-Interscience, New York, 1982). Numerous recent observations that various immune effectors can directly or indirectly inhibit growth of tumors has led to renewed interest in this approach to cancer therapy, e.g. Jager, et al., Oncology 2001;60(1):1-7; Renner, et al., Ann Hematol December 2000;79(12):651-9.

[0267] Four-basic cell types whose function has been associated with antitumor cell immunity and the elimination of tumor cells from the body are: i) B-lymphocytes which secrete immunoglobulins into the blood plasma for identifying and labeling the nonself invader cells; ii) monocytes which secrete the complement proteins that are responsible for lysing and processing the immunoglobulin-coated target invader cells; iii) natural killer lymphocytes having two mechanisms for the destruction of tumor cells, antibody-dependent cellular cytotoxicity and natural killing; and iv) T-lymphocytes possessing antigen-specific receptors and having the capacity to recognize a tumor cell carrying complementary marker molecules (Schreiber, H., 1989, in Fundamental Immunology (ed). W. E. Paul, pp. 923-955).

[0268] Cancer immunotherapy generally focuses on inducing humoral immune responses, cellular immune responses, or both. Moreover, it is well established that induction of CD4⁺ T helper cells is necessary in order to secondarily induce either antibodies or cytotoxic CD8⁺ T cells. Polypeptide antigens that are selective or ideally specific for cancer cells, particularly colon cancer cells, offer a powerful approach for inducing immune responses against colon cancer, and are an important aspect of the present invention.

[0269] Therefore, in further aspects of the present invention, the pharmaceutical compositions described herein may be used to stimulate an immune response against cancer, particularly for the immunotherapy of colon cancer. Within such methods, the pharmaceutical compositions described herein are administered to a patient, typically a warm-blooded animal, preferably a human. A patient may or may not be afflicted with cancer. Pharmaceutical compositions and vaccines may be administered either prior to or following surgical removal of primary tumors and/or treatment such as administration of radiotherapy or conventional chemotherapeutic drugs. As discussed above, administration of the pharmaceutical compositions may be by any suitable method, including administration by intravenous, intraperitoneal, intramuscular, subcutaneous, intranasal, intradermal, anal, vaginal, topical and oral routes.

[0270] Within certain embodiments, immunotherapy may be active immunotherapy, in which treatment relies on the in vivo stimulation of the endogenous host immune system to react against tumors with the administration of immune response-modifying agents (such as polypeptides and polynucleotides as provided herein).

[0271] Within other embodiments, immunotherapy may be passive immunotherapy, in which treatment involves the delivery of agents with established tumor-immune reactivity (such as effector cells or antibodies) that can directly or indirectly mediate antitumor effects and does not necessarily depend on an intact host immune system. Examples of effector cells include T cells as discussed above, T lymphocytes (such as CD8⁺ cytotoxic T lymphocytes and CD4⁺ T-helper tumor-infiltrating lymphocytes), killer cells (such as Natural Killer cells and lymphokine-activated killer cells), B cells and antigen-presenting cells (such as dendritic cells and macrophages) expressing a polypeptide provided herein. T cell receptors and antibody receptors specific for the polypeptides recited herein may be cloned, expressed and transferred into other vectors or effector cells for adoptive immunotherapy. The polypeptides provided herein may also be used to generate antibodies or anti-idiotypic antibodies (as described above and in U.S. Pat. No. 4,918,164) for passive immunotherapy.

[0272] Monoclonal antibodies may be labeled with any of a variety of labels for desired selective usages in detection, diagnostic assays or therapeutic applications (as described in U.S. Pat. Nos. 6,090,365; 6,015,542; 5,843,398; 5,595,721; and 4,708,930, hereby incorporated by reference in their entirety as if each was incorporated individually). In each case, the binding of the labelled monoclonal antibody to the determinant site of the antigen will signal detection or delivery of a particular therapeutic agent to the antigenic determinant on the non-normal cell. A further object of this invention is to provide the specific monoclonal antibody suitably labelled for achieving such desired selective usages thereof.

[0273] Effector cells may generally be obtained in sufficient quantities for adoptive immunotherapy by growth in vitro, as described herein. Culture conditions for expanding single antigen-specific effector cells to several billion in number with retention of antigen recognition in vivo are well known in the art. Such in vitro culture conditions typically use intermittent stimulation with antigen, often in the presence of cytokines (such as IL-2) and non-dividing feeder cells. As noted above, immunoreactive polypeptides as provided herein may be used to rapidly expand antigen-specific T cell cultures in order to generate a sufficient number of cells for immunotherapy. In particular, antigen-presenting cells, such as dendritic, macrophage, monocyte, fibroblast and/or B cells, may be pulsed with immunoreactive polypeptides or transfected with one or more polynucleotides using standard techniques well known in the art. For example, antigen-presenting cells can be transfected with a polynucleotide having a promoter appropriate for increasing expression in a recombinant virus or other expression system. Cultured effector cells for use in therapy must be able to grow and distribute widely, and to survive long term in vivo. Studies have shown that cultured effector cells can be induced to grow in vivo and to survive long term in substantial numbers by repeated stimulation with antigen supplemented with IL-2 (see, for example, Cheever et al., Immunological Reviews 157:177, 1997).

[0274] Alternatively, a vector expressing a polypeptide recited herein may be introduced into antigen presenting cells taken from a patient and clonally propagated ex vivo for transplant back into the same patient. Transfected cells may be reintroduced into the patient using any means known in the art, preferably in sterile form by intravenous, intracavitary, intraperitoneal or intratumor administration.

[0275] Routes and frequency of administration of the therapeutic compositions described herein, as well as dosage, will vary from individual to individual, and may be readily established using standard techniques. In general, the pharmaceutical compositions and vaccines may be administered by injection (e.g., intracutaneous, intramuscular, intravenous or subcutaneous), intranasally (e.g., by aspiration) or orally. Preferably, between 1 and 10 doses may be administered over a 52 week period. Preferably, 6 doses are administered, at intervals of 1 month, and booster vaccinations may be given periodically thereafter. Alternate protocols may be appropriate for individual patients. A suitable dose is an amount of a compound that, when administered as described above, is capable of promoting an anti-tumor immune response, and is at least 10-50% above the basal (i.e., untreated) level. Such response can be monitored by measuring the anti-tumor antibodies in a patient or by vaccine-dependent generation of cytolytic effector cells capable of killing the patient's tumor cells in vitro. Such vaccines should also be capable of causing an immune response that leads to an improved clinical outcome (e.g., more frequent remissions, complete or partial or longer disease-free survival) in vaccinated patients as compared to non-vaccinated patients. In general, for pharmaceutical compositions and vaccines comprising one or more polypeptides, the amount of each polypeptide present in a dose ranges from about 25 μg to 5 mg per kg of host. Suitable dose sizes will vary with the size of the patient, but will typically range from about 0.1 mL to about 5 mL.

[0276] In general, an appropriate dosage and treatment regimen provides the active compound(s) in an amount sufficient to provide therapeutic and/or prophylactic benefit. Such a response can be monitored by establishing an improved clinical outcome (e.g., more frequent remissions, complete or partial, or longer disease-free survival) in treated patients as compared to non-treated patients. Increases in preexisting immune responses to a tumor protein generally correlate with an improved clinical outcome. Such immune responses may generally be evaluated using standard proliferation, cytotoxicity or cytokine assays, which may be performed using samples obtained from a patient before and after treatment.

[0277] Cancer Detection and Diagnostic Compositions, Methods and Kits

[0278] In general, a cancer may be detected in a patient based on the presence of one or more colon tumor proteins and/or polynucleotides encoding such proteins in a biological sample (for example, blood, sera, sputum urine and/or tumor biopsies) obtained from the patient. In other words, such proteins may be used as markers to indicate the presence or absence of a cancer such as colon cancer. In addition, such proteins may be useful for the detection of other cancers. The binding agents provided herein generally permit detection of the level of antigen that binds to the agent in the biological sample.

[0279] Polynucleotide primers and probes may be used to detect the level of mRNA encoding a tumor protein, which is also indicative of the presence or absence of a cancer. In general, a tumor sequence should be present at a level that is at least two-fold, preferably three-fold, and more preferably five-fold or higher in tumor tissue than in normal tissue of the same type from which the tumor arose. Expression levels of a particular tumor sequence in tissue types different from that in which the tumor arose are irrelevant in certain diagnostic embodiments since the presence of tumor cells can be confirmed by observation of predetermined differential expression levels, e.g., 2-fold, 5-fold, etc, in tumor tissue to expression levels in normal tissue of the same type.

[0280] Other differential expression patterns can be utilized advantageously for diagnostic purposes. For example, in one aspect of the invention, overexpression of a tumor sequence in tumor tissue and normal tissue of the same type, but not in other normal tissue types, e.g. PBMCs, can be exploited diagnostically. In this case, the presence of metastatic tumor cells, for example in a sample taken from the circulation or some other tissue site different from that in which the tumor arose, can be identified and/or confirmed by detecting expression of the tumor sequence in the sample, for example using RT-PCR analysis. In many instances, it will be desired to enrich for tumor cells in the sample of interest, e.g., PBMCs, using cell capture or other like techniques.

[0281] There are a variety of assay formats known to those of ordinary skill in the art for using a binding agent to detect polypeptide markers in a sample. See, e.g., Harlow and Lane, Antibodies: A Laboratory Manual, Cold Spring Harbor Laboratory, 1988. In general, the presence or absence of a cancer in a patient may be determined by (a) contacting a biological sample obtained from a patient with a binding agent; (b) detecting in the sample a level of polypeptide that binds to the binding agent; and (c) comparing the level of polypeptide with a predetermined cut-off value.

[0282] In a preferred embodiment, the assay involves the use of binding agent immobilized on a solid support to bind to and remove the polypeptide from the remainder of the sample. The bound polypeptide may then be detected using a detection reagent that contains a reporter group and specifically binds to the binding agent/polypeptide complex. Such detection reagents may comprise, for example, a binding agent that specifically binds to the polypeptide or an antibody or other agent that specifically binds to the binding agent, such as an anti-immunoglobulin, protein G, protein A or a lectin. Alternatively, a competitive assay may be utilized, in which a polypeptide is labeled with a reporter group and allowed to bind to the immobilized binding agent after incubation of the binding agent with the sample. The extent to which components of the sample inhibit the binding of the labeled polypeptide to the binding agent is indicative of the reactivity of the sample with the immobilized binding agent. Suitable polypeptides for use within such assays include full length colon tumor proteins and polypeptide portions thereof to which the binding agent binds, as described above.

[0283] The solid support may be any material known to those of ordinary skill in the art to which the tumor protein may be attached. For example, the solid support may be a test well in a microtiter plate or a nitrocellulose or other suitable membrane. Alternatively, the support may be a bead or disc, such as glass, fiberglass, latex or a plastic material such as polystyrene or polyvinylchloride. The support may also be a magnetic particle or a fiber optic sensor, such as those disclosed, for example, in U.S. Pat. No. 5,359,681. The binding agent may be immobilized on the solid support using a variety of techniques known to those of skill in the art, which are amply described in the patent and scientific literature. In the context of the present invention, the term “immobilization” refers to both noncovalent association, such as adsorption, and covalent attachment (which may be a direct linkage between the agent and functional groups on the support or may be a linkage by way of a cross-linking agent). Immobilization by adsorption to a well in a microtiter plate or to a membrane is preferred. In such cases, adsorption may be achieved by contacting the binding agent, in a suitable buffer, with the solid support for a suitable amount of time. The contact time varies with temperature, but is typically between about 1 hour and about 1 day. In general, contacting a well of a plastic microtiter plate (such as polystyrene or polyvinylchloride) with an amount of binding agent ranging from about 10 ng to about 10 μg, and preferably about 100 ng to about 1 μg, is sufficient to immobilize an adequate amount of binding agent.

[0284] Covalent attachment of binding agent to a solid support may generally be achieved by first reacting the support with a bifunctional reagent that will react with both the support and a functional group, such as a hydroxyl or amino group, on the binding agent. For example, the binding agent may be covalently attached to supports having an appropriate polymer coating using benzoquinone or by condensation of an aldehyde group on the support with an amine and an active hydrogen on the binding partner (see, e.g., Pierce Immunotechnology Catalog and Handbook, 1991, at A12-A13).

[0285] In certain embodiments, the assay is a two-antibody sandwich assay. This assay may be performed by first contacting an antibody that has been immobilized on a solid support, commonly the well of a microtiter plate, with the sample, such that polypeptides within the sample are allowed to bind to the immobilized antibody. Unbound sample is then removed from the immobilized polypeptide-antibody complexes and a detection reagent (preferably a second antibody capable of binding to a different site on the polypeptide) containing a reporter group is added. The amount of detection reagent that remains bound to the solid support is then determined using a method appropriate for the specific reporter group.

[0286] More specifically, once the antibody is immobilized on the support as described above, the remaining protein binding sites on the support are typically blocked. Any suitable blocking agent known to those of ordinary skill in the art, such as bovine serum albumin or Tween 20™ (Sigma Chemical Co., St. Louis, Mo.). The immobilized antibody is then incubated with the sample, and polypeptide is allowed to bind to the antibody. The sample may be diluted with a suitable diluent, such as phosphate-buffered saline (PBS) prior to incubation. In general, an appropriate contact time (i.e., incubation time) is a period of time that is sufficient to detect the presence of polypeptide within a sample obtained from an individual with colon cancer at least about 95% of that achieved at equilibrium between bound and unbound polypeptide. Those of ordinary skill in the art will recognize that the time necessary to achieve equilibrium may be readily determined by assaying the level of binding that occurs over a period of time. At room temperature, an incubation time of about 30 minutes is generally sufficient.

[0287] Unbound sample may then be removed by washing the solid support with an appropriate buffer, such as PBS containing 0.1% Tween 20™. The second antibody, which contains a reporter group, may then be added to the solid support. Preferred reporter groups include those groups recited above.

[0288] The detection reagent is then incubated with the immobilized antibody-polypeptide complex for an amount of time sufficient to detect the bound polypeptide. An appropriate amount of time may generally be determined by assaying the level of binding that occurs over a period of time. Unbound detection reagent is then removed and bound detection reagent is detected using the reporter group. The method employed for detecting the reporter group depends upon the nature of the reporter group. For radioactive groups, scintillation counting or autoradiographic methods are generally appropriate. Spectroscopic methods may be used to detect dyes, luminescent groups and fluorescent groups. Biotin may be detected using avidin, coupled to a different reporter group (commonly a radioactive or fluorescent group or an enzyme). Enzyme reporter groups may generally be detected by the addition of substrate (generally for a specific period of time), followed by spectroscopic or other analysis of the reaction products.

[0289] To determine the presence or absence of a cancer, such as colon cancer, the signal detected from the reporter group that remains bound to the solid support is generally compared to a signal that corresponds to a predetermined cut-off value. In one preferred embodiment, the cut-off value for the detection of a cancer is the average mean signal obtained when the immobilized antibody is incubated with samples from patients without the cancer. In general, a sample generating a signal that is three standard deviations above the predetermined cut-off value is considered positive for the cancer. In an alternate preferred embodiment, the cut-off value is determined using a Receiver Operator Curve, according to the method of Sackett et al., Clinical Epidemiology: A Basic Science for Clinical Medicine, Little Brown and Co., 1985, p. 106-7. Briefly, in this embodiment, the cut-off value may be determined from a plot of pairs of true positive rates (i.e., sensitivity) and false positive rates (100%-specificity) that correspond to each possible cut-off value for the diagnostic test result. The cut-off value on the plot that is the closest to the upper left-hand corner (i.e., the value that encloses the largest area) is the most accurate cut-off value, and a sample generating a signal that is higher than the cut-off value determined by this method may be considered positive. Alternatively, the cut-off value may be shifted to the left along the plot, to minimize the false positive rate, or to the right, to minimize the false negative rate. In general, a sample generating a signal that is higher than the cut-off value determined by this method is considered positive for a cancer.

[0290] In a related embodiment, the assay is performed in a flow-through or strip test format, wherein the binding agent is immobilized on a membrane, such as nitrocellulose. In the flow-through test, polypeptides within the sample bind to the immobilized binding agent as the sample passes through the membrane. A second, labeled binding agent then binds to the binding agent-polypeptide complex as a solution containing the second binding agent flows through the membrane. The detection of bound second binding agent may then be performed as described above. In the strip test format, one end of the membrane to which binding agent is bound is immersed in a solution containing the sample. The sample migrates along the membrane through a region containing second binding agent and to the area of immobilized binding agent. Concentration of second binding agent at the area of immobilized antibody indicates the presence of a cancer. Typically, the concentration of second binding agent at that site generates a pattern, such as a line, that can be read visually. The absence of such a pattern indicates a negative result. In general, the amount of binding agent immobilized on the membrane is selected to generate a visually discernible pattern when the biological sample contains a level of polypeptide that would be sufficient to generate a positive signal in the two-antibody sandwich assay, in the format discussed above. Preferred binding agents for use in such assays are antibodies and antigen-binding fragments thereof. Preferably, the amount of antibody immobilized on the membrane ranges from about 25 ng to about 1 μg, and more preferably from about 50 ng to about 500 ng. Such tests can typically be performed with a very small amount of biological sample.

[0291] Of course, numerous other assay protocols exist that are suitable for use with the tumor proteins or binding agents of the present invention. The above descriptions are intended to be exemplary only. For example, it will be apparent to those of ordinary skill in the art that the above protocols may be readily modified to use tumor polypeptides to detect antibodies that bind to such polypeptides in a biological sample. The detection of such tumor protein specific antibodies may correlate with the presence of a cancer.

[0292] A cancer may also, or alternatively, be detected based on the presence of T cells that specifically react with a tumor protein in a biological sample. Within certain methods, a biological sample comprising CD4⁺ and/or CD8⁺ T cells isolated from a patient is incubated with a tumor polypeptide, a polynucleotide encoding such a polypeptide and/or an APC that expresses at least an immunogenic portion of such a polypeptide, and the presence or absence of specific activation of the T cells is detected. Suitable biological samples include, but are not limited to, isolated T cells. For example, T cells may be isolated from a patient by routine techniques (such as by Ficoll/Hypaque density gradient centrifugation of peripheral blood lymphocytes). T cells may be incubated in vitro for 2-9 days (typically 4 days) at 37° C. with polypeptide (e.g., 5-25 μg/ml). It may be desirable to incubate another aliquot of a T cell sample in the absence of tumor polypeptide to serve as a control. For CD4⁺ T cells, activation is preferably detected by evaluating proliferation of the T cells. For CD8⁺ T cells, activation is preferably detected by evaluating cytolytic activity. A level of proliferation that is at least two fold greater and/or a level of cytolytic activity that is at least 20% greater than in disease-free patients indicates the presence of a cancer in the patient.

[0293] As noted above, a cancer may also, or alternatively, be detected based on the level of mRNA encoding a tumor protein in a biological sample. For example, at least two oligonucleotide primers may be employed in a polymerase chain reaction (PCR) based assay to amplify a portion of a tumor cDNA derived from a biological sample, wherein at least one of the oligonucleotide primers is specific for (i.e., hybridizes to) a polynucleotide encoding the tumor protein. The amplified cDNA is then separated and detected using techniques well known in the art, such as gel electrophoresis.

[0294] Similarly, oligonucleotide probes that specifically hybridize to a polynucleotide encoding a tumor protein may be used in a hybridization assay to detect the presence of polynucleotide encoding the tumor protein in a biological sample.

[0295] To permit hybridization under assay conditions, oligonucleotide primers and probes should comprise an oligonucleotide sequence that has at least about 60%, preferably at least about 75% and more preferably at least about 90%, identity to a portion of a polynucleotide encoding a tumor protein of the invention that is at least 10 nucleotides, and preferably at least 20 nucleotides, in length. Preferably, oligonucleotide primers and/or probes hybridize to a polynucleotide encoding a polypeptide described herein under moderately stringent conditions, as defined above. Oligonucleotide primers and/or probes which may be usefully employed in the diagnostic methods described herein preferably are at least 10-40 nucleotides in length. In a preferred embodiment, the oligonucleotide primers comprise at least 10 contiguous nucleotides, more preferably at least 15 contiguous nucleotides, of a DNA molecule having a sequence as disclosed herein. Techniques for both PCR based assays and hybridization assays are well known in the art (see, for example, Mullis et al., Cold Spring Harbor Symp. Quant. Biol., 51:263, 1987; Erlich ed., PCR Technology, Stockton Press, NY, 1989).

[0296] One preferred assay employs RT-PCR, in which PCR is applied in conjunction with reverse transcription. Typically, RNA is extracted from a biological sample, such as biopsy tissue, and is reverse transcribed to produce cDNA molecules. PCR amplification using at least one specific primer generates a cDNA molecule, which may be separated and visualized using, for example, gel electrophoresis. Amplification may be performed on biological samples taken from a test patient and from an individual who is not afflicted with a cancer. The amplification reaction may be performed on several dilutions of cDNA spanning two orders of magnitude. A two-fold or greater increase in expression in several dilutions of the test patient sample as compared to the same dilutions of the non-cancerous sample is typically considered positive.

[0297] In another aspect of the present invention, cell capture technologies may be used in conjunction, with, for example, real-time PCR to provide a more sensitive tool for detection of metastatic cells expressing colon tumor antigens. Detection of colon cancer cells in biological samples, e.g., bone marrow samples, peripheral blood, and small needle aspiration samples is desirable for diagnosis and prognosis in colon cancer patients.

[0298] Immunomagnetic beads coated with specific monoclonal antibodies to surface cell markers, or tetrameric antibody complexes, may be used to first enrich or positively select cancer cells in a sample. Various commercially available kits may be used, including Dynabeads® Epithelial Enrich (Dynal Biotech, Oslo, Norway), StemSep™ (StemCell Technologies, Inc., Vancouver, BC), and RosetteSep (StemCell Technologies). A skilled artisan will recognize that other methodologies and kits may also be used to enrich or positively select desired cell populations. Dynabeads® Epithelial Enrich contains magnetic beads coated with mAbs specific for two glycoprotein membrane antigens expressed on normal and neoplastic epithelial tissues. The coated beads may be added to a sample and the sample then applied to a magnet, thereby capturing the cells bound to the beads. The unwanted cells are washed away and the magnetically isolated cells eluted from the beads and used in further analyses.

[0299] RosetteSep can be used to enrich cells directly from a blood sample and consists of a cocktail of tetrameric antibodies that targets a variety of unwanted cells and crosslinks them to glycophorin A on red blood cells (RBC) present in the sample, forming rosettes. When centrifuged over Ficoll, targeted cells pellet along with the free RBC. The combination of antibodies in the depletion cocktail determines which cells will be removed and consequently which cells will be recovered. Antibodies that are available include, but are not limited to: CD2, CD3, CD4, CD5, CD8, CD10, CD11b, CD14, CD15, CD16, CD19, CD20, CD24, CD25, CD29, CD33, CD34, CD36, CD38, CD41, CD45, CD45RA, CD45RO, CD56, CD66B, CD66e, HLA-DR, IgE, and TCRαβ.

[0300] Additionally, it is contemplated in the present invention that mAbs specific for colon tumor antigens can be generated and used in a similar manner. For example, mAbs that bind to tumor-specific cell surface antigens may be conjugated to magnetic beads, or formulated in a tetrameric antibody complex, and used to enrich or positively select metastatic colon tumor cells from a sample. Once a sample is enriched or positively selected, cells may be lysed and RNA isolated. RNA may then be subjected to RT-PCR analysis using colon tumor-specific primers in a real-time PCR assay as described herein. One skilled in the art will recognize that enriched or selected populations of cells may be analyzed by other methods (e.g. in situ hybridization or flow cytometry).

[0301] In another embodiment, the compositions described herein may be used as markers for the progression of cancer. In this embodiment, assays as described above for the diagnosis of a cancer may be performed over time, and the change in the level of reactive polypeptide(s) or polynucleotide(s) evaluated. For example, the assays may be performed every 24-72 hours for a period of 6 months to 1 year, and thereafter performed as needed. In general, a cancer is progressing in those patients in whom the level of polypeptide or polynucleotide detected increases over time. In contrast, the cancer is not progressing when the level of reactive polypeptide or polynucleotide either remains constant or decreases with time.

[0302] Certain in vivo diagnostic assays may be performed directly on a tumor. One such assay involves contacting tumor cells with a binding agent. The bound binding agent may then be detected directly or indirectly via a reporter group. Such binding agents may also be used in histological applications. Alternatively, polynucleotide probes may be used within such applications.

[0303] As noted above, to improve sensitivity, multiple tumor protein markers may be assayed within a given sample. It will be apparent that binding agents specific for different proteins provided herein may be combined within a single assay. Further, multiple primers or probes may be used concurrently. The selection of tumor protein markers may be based on routine experiments to determine combinations that results in optimal sensitivity. In addition, or alternatively, assays for tumor proteins provided herein may be combined with assays for other known tumor antigens.

[0304] The present invention further provides kits for use within any of the above diagnostic methods. Such kits typically comprise two or more components necessary for performing a diagnostic assay. Components may be compounds, reagents, containers and/or equipment. For example, one container within a kit may contain a monoclonal antibody or fragment thereof that specifically binds to a tumor protein. Such antibodies or fragments may be provided attached to a support material, as described above. One or more additional containers may enclose elements, such as reagents or buffers, to be used in the assay. Such kits may also, or alternatively, contain a detection reagent as described above that contains a reporter group suitable for direct or indirect detection of antibody binding.

[0305] Alternatively, a kit may be designed to detect the level of mRNA encoding a tumor protein in a biological sample. Such kits generally comprise at least one oligonucleotide probe or primer, as described above, that hybridizes to a polynucleotide encoding a tumor protein. Such an oligonucleotide may be used, for example, within a PCR or hybridization assay. Additional components that may be present within such kits include a second oligonucleotide and/or a diagnostic reagent or container to facilitate the detection of a polynucleotide encoding a tumor protein.

[0306] The following Examples are offered by way of illustration and not by way of limitation.

### EXAMPLES

### Example 1

[0307] Preparation of Colon Tumor Subtraction Libraries and Identification of Colon Tumor Protein cDNAs

[0308] This Example illustrates the identification of cDNA molecules encoding colon tumor proteins. PolyA mRNA was prepared from a pool of three colon tumor cell lines (adenocarcinomas) grown in SCID mice were subtracted with a set of transcripts from normal lung, adrenal gland, bone marrow, small intestine, stomach, pancreas, normal colon, HMEC (human mammary epithelial cell line) and SCID mouse liver/spleen samples. The cDNA synthesis, hybridizations, and PCR amplifications were performed according to standard procedures (Clontech), with modifications at the cDNA digestion steps and in the tester to driver hybridization ratios. Following the PCR amplification steps, the cDNAs were cloned into the pCR2.1 plasmid vector. To analyze the efficiency of the subtraction, the housekeeping gene, actin, was PCR amplified from dilutions of subtracted as well as unsubtracted PCR samples. This results suggest that the library was enriched for genes overexpressed in colon tumor samples.

[0309] The Clontech PCR-based cDNA subtraction approach was utilized to prepare two cDNA libraries from pools of tester mRNA collected from three Dukes B stage colon tumor samples. Eight normal tissues, including lung, adrenal gland, bone marrow, small intestine, heart, pancreas, colon, and liver were represented in the driver mRNA pool. The two libraries, CS/B1105 and CS/B1605, shared the same tester and driver mRNA samples but differed in their tester:driver ratios (1:5 and 1:30, respectively). To analyze the efficiency of the subtraction, the housekeeping gene, actin, was PCR amplified from dilutions of subtracted as well as unsubtracted PCR samples. This results suggest that the library was enriched for genes overexpressed in colon tumor samples. 172 randomly selected clones were subjected to DNA sequencing and are presented herein as SEQ ID NO: 57-229. Additional sequence data was generated by bulk sequencing clones isolated from the CS/B 1105 and CS/B 1605 subtraction libraries and are presented herein as SEQ ID NO: 230-1660.

[0310] Further disclosed herein are sequences derived from a fourth colon tumor expression library which sequences are presented herein as SEQ ID NO: 1661-1704.

[0311] Antigens obtained from this colon PCR subtracted cDNA libraries may be used for immunotherapeutic purposes in individuals with colon adenocarcinoma and/or as diagnostic markers for colon adenocarcinoma.

### Example 2

[0312] Analysis of cDNA Expression Using Microarray Technology

[0313] In additional studies, sequences disclosed herein were evaluated for overexpression in specific tumor tissues by microarray analysis. Using this approach, cDNA sequences were PCR amplified and their mRNA expression profiles in tumor and normal tissues were examined using cDNA microarray technology essentially as described (Schena et al., Science 270(5235):467-70 (1995). In brief, the clones were arrayed onto glass slides as multiple replicas, with each location corresponding to a unique cDNA clone (as many as 5500 clones can be arrayed on a single slide, or chip). Each chip was hybridized with a pair of cDNA probes that were fluorescence-labeled with Cy3 and Cy5, respectively. Typically, 1 μg of polyA⁺ RNA was used to generate each cDNA probe. After hybridization, the chips were scanned and the fluorescence intensity recorded for both Cy3 and Cy5 channels. There were multiple built-in quality control steps. First, the probe quality was monitored using a panel of ubiquitously expressed genes. Secondly, the control plate also includee yeast DNA fragments of which complementary RNA were spiked into the probe synthesis for measuring the quality of the probe and the sensitivity of the analysis. Currently, this methodology offers a sensitivity of 1 in 100,000 copies of mRNA. Finally, the reproducibility of this technology was ensured by including duplicated control cDNA elements at different locations.

[0314] Table 2 identifies 27 clones found to be at least two-fold overexpressed in colon tumor cells as compared to a panel of normal tissues by microarray analysis.

TABLE 2

| array | Clone Sequence Identifier | Ratio | clone I.D. |
|---|---|---|---|
| p0175r03c18 | R0676 F9 | 2.62 | 72239, |
| p0174r13c21 | R0675 A11 | 2.16 | 72237, |
| p0174r09c13 | R0674 A7 | 2.67 | 72236, |
| p0176r01c22 | R0680 B11 | 2.3 | 72244, |
| p0174r05c17 | R0673 A9 | 2.09 | 72234, |
| p0174r08c24 | R0673 H12 | 2.06 | 71574, 72235 |
| p0174r16c17 | R0675 G9 | 2.46 | 72238, |
| p0175r07c22 | R0677 F11 | 3.21 | 72241, |
| p0176r03c02 | R0680 F1 | 2.93 | 72245, |
| p0176r04c06 | R0680 H3 | 2.09 | 72246, |
| p0177r07c22 | R0685 F11 | 2.27 | 71675, 72247, 72902, 71041 |
| p0177r13c06 | R0687 B3 | 3.43 | 72249, 72904, 70985 |
| p0175r10c04 | R0678 D2 | 2.05 | 70424, 72899 |
| p0176r16c05 | R0683 G3 | 2.03 | 70426, 72900 |
| p0174r07c23 | R0673 E12 | 2.58 | 72901, |
| p0174r03c05 | R0672 E3 | 2.09 | 72233 |
| p0175r06c13 | R0677 C7 | 2.13 | 72240 |
| p0175r11c19 | R0678 E10 | 3.44 | 72242 |
| p0175r14c21 | R0679 C11 | 2.75 | 72243 |
| p0174r10c20 | R0674 D10 | 2.58 | 71575 |
| p0172r01c06 | R0664 B3 | 2.05 | 71569 |
| p0173r09c05 | R0670 A3 | 2.35 | 71571 |
| p0172r05c18 | R0665 B9 | 2.36 | 70580 |
| p0175r04c07 | 676_G4 & 678 _H12 & 681_B5 & 682_E4 | 3.94 | 70581, 70582, 70586, 70589 |
| p0176r07c14 | R0681 F7 | 2.27 | 70587 |
| p0176r08c22 | R0681 H11 | 2.02 | 70584 |
| p0176r08c06 | R0681 H3 | 2.25 | 70588 |

[0315] In addition, the following clones (Table 3) were repeatedly identified by microarray analysis as being at least two-fold overexpressed in colon tumor cells as compared to a panel of normal tissues.

TABLE 3

| | | | |
|---|---|---|---|
| 70971 | 70973 | 70974 | 71049 |
| 70975 | 70977 | 70980 | 71058 |
| 70981 | 70982 | 70986 | 71063 |
| 70987 | 70988 | 70997 | 71051 |
| 70998 | 70999 | 71006 | 71059 |
| 71008 | 71009 | 71011 | 71065 |
| 71012 | 71018 | 71021 | 71055 |
| 71022 | 71024 | 71028 | 71062 |
| 71029 | 71032 | 71036 | 71066 |
| 71037 | 71039 | 71045 | |

### Example 3

[0316] Analysis of cDNA Expression Using Real-time PCR

[0317] Two clones isolated from the subtraction library described in Example 1 and that showed at least 2-fold overexpression in colon tumors by microarray, were selected for further mRNA expression analysis by real-time PCR. The first clone, C1490P (SEQ ID NO:1660; also referred to as clone R0680 B11 and 72244), showed no significant similarity to any known sequences when searched against the Genbank nucleic acid database. The second clone, C1491P (SEQ ID NO:1681; also referred to as clone R0683 G3 and 70426), has some similarity to adenovirus EIA enhancer binding protein (set forth in SEQ ID NO:1788 (cDNA) and 1789 (amino acid)).

[0318] The first-strand cDNA used in the quantitative real-time PCR was synthesized from 20 μg of total RNA that was treated with DNase I (Amplification Grade, Gibco BRL Life Technology, Gaithersburg, Md.), using Superscript Reverse Transcriptase (RT)(Gibco BRL Life Technology, Gaithersburg, Md.). Real-time PCR was performed with a GeneAmp™ 5700 sequence detection system (PE Biosystems, Foster City, Calif.). The 5700 system uses SYBR™ green, a fluorescent dye that only intercalates into double stranded DNA, and a set of gene-specific forward and reverse primers. The increase in fluorescence was monitored during the whole amplification process. The optimal concentration of primers was determined using a checkerboard approach and a pool of cDNAs from breast tumors was used in this process. The PCR reaction was performed in 25 μl volumes that include 2.5 μl of SYBR green buffer, 2 μl of cDNA template and 2.5 μl each of the forward and reverse primers for the gene of interest. The cDNAs used for RT reactions were diluted 1:10 for each gene of interest and 1:100 for the β-actin control. In order to quantitate the amount of specific cDNA (and hence initial mRNA) in the sample, a standard curve was generated for each run using the plasmid DNA containing the gene of interest. Standard curves were generated using the Ct values determined in the real-time PCR which were related to the initial cDNA concentration used in the assay. Standard dilution ranging from 20-2×10⁶ copies of the gene of interest was used for this purpose. In addition, a standard curve was generated for β-actin ranging from 200 fg-2000 fg. This enabled standardization of the initial RNA content of a tissue sample to the amount of β-actin for comparison purposes. The mean copy number for each group of tissues tested was normalized to a constant amount of β-actin, allowing the evaluation of the over-expression levels seen with each of the genes.

[0319] The real-time analysis confirmed previous microarray results and showed that C1490P is overexpressed in the majority of colon tumor samples in comparison to normal samples. Overexpression of C1490P was also seen in lymph nodes and thymus. Some C1490P expression was observed in normal colon but at a much lower level than was seen in tumor samples. Likewise, some low levels of expression were observed in breast, esophagus, small intestine, stomach, trachea, thymus, and bone marrow. C1491P is overexpressed in the majority of colon tumor samples when compared to normal colon and a panel of other normal tissue. Low expression of this gene was observed in normal pancreas, pituitary, and low expression in some salivary and adrenal gland samples. Thus, the results indicate that these 2 candidates may be used for immunotherapeutic purposes in individuals with colon cancer and/or as diagnostic markers for colon cancer.

### Example 4

[0320] Peptide Priming of T-helper Lines

[0321] Generation of CD4⁺ T helper lines and identification of peptide epitopes derived from tumor-specific antigens that are capable of being recognized by CD4⁺ T cells in the context of HLA class II molecules, is carried out as follows:

[0322] Fifteen-mer peptides overlapping by 10 amino acids, derived from a tumor-specific antigen, are generated using standard procedures. Dendritic cells (DC) are derived from PBMC of a normal donor using GM-CSF and IL-4 by standard protocols. CD4⁺ T cells are generated from the same donor as the DC using MACS beads (Miltenyi Biotec, Auburn, Calif.) and negative selection. DC are pulsed overnight with pools of the 15-mer peptides, with each peptide at a final concentration of 0.25 μg/ml. Pulsed DC are washed and plated at 1×10⁴ cells/well of 96-well V-bottom plates and purified CD4⁺ T cells are added at 1×10⁵/well. Cultures are supplemented with 60 ng/ml IL-6 and 10 ng/ml IL-12 and incubated at 37° C. Cultures are restimulated as above on a weekly basis using DC generated and pulsed as above as antigen presenting cells, supplemented with 5 ng/ml IL-7 and 10 U/ml IL-2. Following 4 in vitro stimulation cycles, resulting CD4⁺ T cell lines (each line corresponding to one well) are tested for specific proliferation and cytokine production in response to the stimulating pools of peptide with an irrelevant pool of peptides used as a control.

### Example 5

[0323] Generation of Tumor-specific CTL Lines Using in Vitro Whole-gene Priming

[0324] Using in vitro whole-gene priming with tumor antigen-vaccinia infected DC (see, for example, Yee et al, The Journal of Immunology, 157(9):4079-86, 1996), human CTL lines are derived that specifically recognize autologous fibroblasts transduced with a specific tumor antigen, as determined by interferon-γ ELISPOT analysis. Specifically, dendritic cells (DC) are differentiated from monocyte cultures derived from PBMC of normal human donors by growing for five days in RPMI medium containing 10% human serum, 50 ng/ml human GM-CSF and 30 ng/ml human IL-4. Following culture, DC are infected overnight with tumor antigen-recombinant vaccinia virus at a multiplicity of infection (M.O.I) of five, and matured overnight by the addition of 3 μg/ml CD40 ligand. Virus is then inactivated by UV irradiation. CD8+ T cells are isolated using a magnetic bead system, and priming cultures are initiated using standard culture techniques. Cultures are restimulated every 7-10 days using autologous primary fibroblasts retrovirally transduced with previously identified tumor antigens. Following four stimulation cycles, CD8+ T cell lines are identified that specifically produce interferon-γ when stimulated with tumor antigen-transduced autologous fibroblasts. Using a panel of HLA-mismatched B-LCL lines transduced with a vector expressing a tumor antigen, and measuring interferon-γ production by the CTL lines in an ELISPOT assay, the HLA restriction of the CTL lines is determined.

### Example 6

[0325] Generation and Characterization of Anti-tumor Antigen Monoclonal Antibodies

[0326] Mouse monoclonal antibodies are raised against E. coli derived tumor antigen proteins as follows: Mice are immunized with Complete Freund's Adjuvant (CFA) containing 50 μg recombinant tumor protein, followed by a subsequent intraperitoneal boost with Incomplete Freund's Adjuvant (IFA) containing 10 μg recombinant protein. Three days prior to removal of the spleens, the mice are immunized intravenously with approximately 50 μg of soluble recombinant protein. The spleen of a mouse with a positive titer to the tumor antigen is removed, and a single-cell suspension made and used for fusion to SP2/O myeloma cells to generate B cell hybridomas. The supernatants from the hybrid clones are tested by ELISA for specificity to recombinant tumor protein, and epitope mapped using peptides that spanned the entire tumor protein sequence. The mAbs are also tested by flow cytometry for their ability to detect tumor protein on the surface of cells stably transfected with the cDNA encoding the tumor protein.

### Example 7

[0327] Synthesis of Polypeptides

[0328] Polypeptides are synthesized on a Perkin Elmer/Applied Biosystems Division 430A peptide synthesizer using FMOC chemistry with HPTU (O-Benzotriazole-N,N,N′,N′-tetramethyluronium hexafluorophosphate) activation. A Gly—Cys—Gly sequence is attached to the amino terminus of the peptide to provide a method of conjugation, binding to an immobilized surface, or labeling of the peptide. Cleavage of the peptides from the solid support is carried out using the following cleavage mixture: trifluoroacetic acid:ethanedithiol:thioanisole:water:phenol (40:1:2:2:3). After cleaving for 2 hours, the peptides are precipitated in cold methyl-t-butyl-ether. The peptide pellets are then dissolved in water containing 0.1% trifluoroacetic acid (TFA) and lyophilized prior to purification by C18 reverse phase HPLC. A gradient of 0%-60% acetonitrile (containing 0.1% TFA) in water (containing 0.1% TFA) is used to elute the peptides. Following lyophilization of the pure fractions, the peptides are characterized using electrospray or other types of mass spectrometry and by amino acid analysis.

[0329] From the foregoing it will be appreciated that, although specific embodiments of the invention have been described herein for purposes of illustration, various modifications may be made without deviating from the spirit and scope of the invention. Accordingly, the invention is not limited except as by the appended claims.

The application's sequence listing, which the Patent Office published only in electronic form, follows.

SEQUENCE LISTING (1789 sequences)

SEQ ID NO: 1 - DNA, 656 bp, Homo sapiens
  misc_feature 544, 560, 627, 635: n = A,T,C or G
cctccacaaagtgtctgtgctgttgctgttctccaagccagtcttcatgtgtagggtggggggtgaggacacactttcgggctctgcagggaggccagaagtattcttccctccatcaatagctttcttgttggaaaggagggaatcctttatttcagagtcaataacaatcttaaggacatctggctcagaggctggttctgcaagttgtttttcattctcagaaaagtcatcgtcttccaagtgcaagaggaggggactgatagagtcactctccccttgaacatcaggcaactctttcaaaccagttcccaagtgctcaacctggaaagttgctctgcttccaggaggaaccttactaataaaagcccgccgagcatcccctgggaactctgtatccatagagctgggtagttcagccaggccaacagagtcatcatttagttgttgattaagaaaggcaatttcattgagcagtgaagtcagtgtctcatcagtatcatcctcatcttccatgttaggtcagcagttcactggaatcaanactgcttcctctatanctgatgttactttcctcagttccatctctatgctttgaagcccttgaaaactttcatcttttatttntgaaaaangaagaatcctttgaatttcac

SEQ ID NO: 2 - DNA, 373 bp, Homo sapiens
ctgtcccatggggtccttattgtaatctagaccatcttgttctagatgggcacttaagccctgtttcttcatagtctgttatgctgtcatttggacctggatgcttcctgtttcttccagcaatttttgtttgtgttttttgttgttgaagagaggaacatttaaggagttagataaactggtaattttcagatgtgtagaaaattgcataggtggtgaaagccaatgccataggctctgaaattttactatttcctacatcaggaaatgtgtaccaaaagtgctaaaatgccaagaataattttgagtatctaaagatagataaatcttttcatctgagtggaaatggcattatgactttatattctcatgg

SEQ ID NO: 3 - DNA, 642 bp, Homo sapiens
  misc_feature 541, 598, 621, 639: n = A,T,C or G
gtgctgtgtgtaagtggagaacttggggatagaggaggaagctcctcgtggcccttccaaggtgaggcaaaggcatctggacttgttccagcccagcccaccgggtgacatcaccgggcagggaggggtgctggtggtggttcatacggagtaagctgctctgcctgtgtgagtggctcctgggccctaaacaggcacctttaggccatgggtcactcaccgtgagccatcaatgtgctctggtctgacatggtttctctctgtcttctagtctagacctagtttttttgttctgttccccacgtatggatatagtagagattgttgtctgtgaaatttctcttttgtagattttgagttttcccttgtagtgtaaagaatgatcactttctgtaacaataacaagaccactttttaagatttatcctgtttgttctttgttgattgaaacataataattgttaaaattctctacagccttctttttcttccatagctaatcttccttctaatagtttttgctttctgttttgctgttgtncttttgcaaagctttcccctcatagcctgtacctgttatcaatataaaaataatctncctgtgggaatgcttcattgacntgaatttctcctttgganaaa

SEQ ID NO: 4 - DNA, 575 bp, Homo sapiens
  misc_feature 492: n = A,T,C or G
ctggaagccagttcccagaagaccaaactgcatgccccaatcgccaaggtaatttattcttattacttgatgtcctaaagcttctttgagatttgctataaaatttcctatgatggtagaacgcaaatgtccaacatgaaattttttggcaacattaggtgaactgaattcaaccacaatcttcttctggggaagtccagagaaaagttcactttttaatccatattttgagccatcttcaattacttgttgtagcactgtctttgttaagagctctctgtttattttgaaatttacagtcctttgaccagtactgatttcactcaccactgtatcacatcttagcttctctgctagtctcttggcttgaacttgaatatctggtcttgaatggtcattgtctttttccaataaagaatccacagaaagctgaaaatcagctacttcttctttttgggaaattggaactgcagatattgatgtgatcaagtnttctggtggaagattcaacactctggaaagctggcaagcaatagcgcggcgaaagccgcacgccatgtccacctctacgggaa

SEQ ID NO: 5 - DNA, 558 bp, Homo sapiens
caagaaaaagcggatggtggttcctgctgccctcaaggtcgtgcgtctgaagcctacaagaaagtttgcctatctggggcgcctggctcacgaggttggctggaagtaccaggcagtgacagccaccctggaggagaagaggaaagagaaagccaagatccactaccggaagaagaaacagctcatgaggctacggaaacaggccgagaagaacgtggagaagaaaattgacaaatacacagaggtcctcaagacccacggactcctggtctgagcccaataaagactgttaattcctcatgcgttgcctgcccttcctccattgttgccctggaatgtacgggacccaggggcagcagcagtccaggtgccacaggcagccctgggacataggaagcttgggagcaaggaaagggtcttagtcactgcctcccgaagttgcttgaaagcactcggagaattgtgcaggtgtcatttatctatgaccaaataggaaagagcaaccagttactatgagtgaaagggagccagaagactgattgggagggccctatcttg

SEQ ID NO: 6 - DNA, 451 bp, Homo sapiens
  misc_feature 24, 301, 306, 375, 430: n = A,T,C or G
cctggcagggaatgcaattctcanagaagacaaagacccgcaaaagatgtatgccaccatctatgagctgaaagaagacaagagctacaatgtcacctccgtcctgtttaggaaaaagaagtgtgactactggatcaggacttttgttccaggttgccagcccggcgagttcacgctgggcaacattaagagttaccctggattaacgagttacctcgtccgagtggtgagcaccaactacaaccagcatgctatggtgttcttcaagaaagtttctcaaaacagggagtcttcaagatcnccctntacgggagaaccaaggagctgacttcggaactaaaggagaacttcatccgcttctccaaatatctgggnctccctgaaaaccacatcgtcttccctgtcccaatcgaccagtgtatcgaccggntgagtgcacaggtgccggcag

SEQ ID NO: 7 - DNA, 555 bp, Homo sapiens
  misc_feature 293, 469: n = A,T,C or G
gcatatttaatgcacacatttgaatgttacacataaataattttaacgatggagtccaagttctggattttacattagatctgcatatataagacacttgtggtcaaatttcaagattggtaaagccagtttcaagctgcttatattttgagtacaggtttcactattacaaatgtatgatgttaaactaacaaactcatgaccttcaaagatgtcttcgtcccacgcacacacatttgtaatttgtgtccatttgctatttcccttcttctataatcttcaaattatatagntatgcattgagttccctatgcatctcacccatctcctttatctcagccttctcatactttgccattctcttctttctggaaataaccagcacaacaattccagcaacaactgctatcaccacaaccacaataacaggcaataacaccagcttttagaccctgcattgagaattcangtgctttttcatcaacataataaattaaagtttgaccaggatccagatccagttgttccccatttactgtcaggtccattttctta

SEQ ID NO: 8 - DNA, 277 bp, Homo sapiens
  misc_feature 51, 76, 96, 118, 124, 163, 172: n = A,T,C or G
gtggagcagctcctgtacgaaagccctgagcggtactcccgctcagtgctnctcatcacccagcacctcagcctgntggagcaggctgaccacatnctctttctggaaggaggcgctntccggnaagggggaacccaccagcagctcatggaaaaaaaggggngctactggnccatggtgcaggctcctgcagatgctccaaaatgaaagccttctcagacctgcgcactccatctccctcccttttcttctctctgtggtggagaaccacagagta

SEQ ID NO: 9 - DNA, 474 bp, Homo sapiens
  misc_feature 431, 446, 464: n = A,T,C or G
cctgcatggattccatgttcatgagtttggagataatacagcaggctgtaccagtgcaggtcctcactttaatcctctatccagaaaacacggtgggccaaaggatgaagagaggcatgttggagacttgggcaatgtgactgctgacaaagatggtgtggccgatgtgtctattgaagattctgtgatctcactctcaggagaccattgcatcattggccgcacactggtggtccatgaaaaagcagatgacttgggcaaaggtggaaatgaagaaagtacaaagacaggaaacgctggaagtcgtttggcttgtggtgtaattgggatccgcccaataaacattcccttggatgtagtctgaggccccttaactcatctgttatcctgctagctgtagaaatgtatcctgataaacattaaacacttgnaatcttaaaagtggnattgtgtgactttttcanaagttgcttt

SEQ ID NO: 10 - DNA, 513 bp, Homo sapiens
  misc_feature 499: n = A,T,C or G
cctataccattcaaggacagtatgccattccacagccagatttgaccaagctgcaccagttggcaatgcaacagtctcattttcccatgacgcatggcaacaccggattcagtggcattgaatccagctctccagaggtgaaaggctattgggcaggtttggatgcatctgctcagactacttctcatgaactcaccattccaaacgatttgattggctgcataatcgggcgtcaaggcgccaaaatcaatgagatccgtcagatgtctggggcgcagatcaaaattgcgaacccagtggaaggatctactgataggcaggttaccatcactggatctgctgccagcattagcctggctcaatatctaatcaatgtcaggctttcctcggagacgggtggcatggggagcagctagaacaatgcagattcatccataatccctttctgctgttcaccaccacccatggatccatctgtgtaagtttctgaacagtcagncgattccaggtttt

SEQ ID NO: 11 - DNA, 606 bp, Homo sapiens
  misc_feature 365, 433, 507, 549, 591: n = A,T,C or G
ctgtctcccacccttgctgtgttgagtctgcgagcctgggatatgctaactcgggggtgatacaacctggaagaagaatgtgaggctctcctggaaagatgcaaaaaccatctcagatccaaggggccaagatcacaaggtcctgctgctacctgaggggtctgaagctttgagggcaggggctggggagtcacaatcctgtgaggcagggagagggaagagtcacaaacccaactcagcgctattctttagccctaggcgctttcactcctcagtgccctagaagtcaccagtaggtgtcaactgggcagacaagggacaggaagacagggatggcccagggctttttacccgtttggttttangcccgtttctccattaagggatgcagaggcaggggtggagtgagtgaatgaatgagtcacatctccanaacagcaggaaggaacagcctctgctggcaatgacagttccccagatgagatccctggggctctgaaagggaanggcaagattcccccccccaaatgccccgggattagggggcanatctgaagggaattcacaaaggggcagccacagggagtgtcntaccttcgggccggc

SEQ ID NO: 12 - DNA, 549 bp, Homo sapiens
  misc_feature 34: n = A,T,C or G
aaaaaagaaaaagtgtttattataggcaacaacnccaatgggaactggtatttgtctacaccaagggagtgcaatttttcatcttccaatggcggcctcaaccttgaggcgaatccactggcgaaagatgcctttctaggaagcagagctccctgactgggctaagatagttcagattgatcttaggtcaatggtaagacctatgtagttcatgaagtcttggcttttcggcgctgggtcgcccaaagcagaatggagacggatagagtggtggctcccagaatcccgaagaacataagcagtgagaacgagccctggcgcatacacttgtatccatggaaaccatcagcacaaacacactgcaaaagacctggaccatcaggtacacaagatccattctcaggacacatttctgggtccccagtgttattgcaaaggttcttttgcccttgacagatttggttgtctatataagaggtgatagtattccagcattaattcctccaggacagttgacatgttgtggcagtatcagagtctggagctgag

SEQ ID NO: 13 - DNA, 723 bp, Homo sapiens
  misc_feature 594, 603, 620, 665, 708: n = A,T,C or G
ctgggagcctttgccatggtacttaggtagggtgtgtgcccccagatttaaccattccataatcatgttagagttacttctataaagtgaacagattttattaatcacggcttttggtgaatttgtttaaggttaattatggtagcaaattttgggcctaaacattatttttctgtatcccgctgtaattcccaaaactctcattattctctaactattacacatgggcatattctgatgtttctcatcctttgccagaagactaccttacatccatcgtaattgttctctaggaaaagagaacttttttcaaaattcaaaatacttcttaaggatggcacagtaccatataactggagtaataaaacatgagcttacattcttacaataactaaaccacttaaaatgatcaaggcactaatgttttggtctgaaaagctgtgtactttatagacattttcagacatttttggaaatttccattaaaggtggaaaatctatttttttcctcctttgcagtgtcttagtttgaatgaaacacttcgaagttctagaaattctagaaagagccttaatgtatttgatgtattctgngataaagangtactaatagtatccancacagatttgcttttctttgctagcacaatgtggtgttgctgcanaatattctttttatattctgtggaaaaaataaaggaaattcanaatggttacctgccc

SEQ ID NO: 14 - DNA, 637 bp, Homo sapiens
aaaatgttttatttcatagctcataaaaaagtatgtatgtacaagactcaagtaaatagaaaggcagctttcaatcacaaatcagtttttcagattttactgtggaagcatatttaatgcacacatttgaatgttacacataaataattttaacgatggagtccaagttctggattttacattagatctgcatatataagacacttgtggtcaaatttcaagattggtaaagccagtttcaagctgcttatattttgagtacaggtttcactattacaaatatatgatgttaaactaacaaactcatgaccttcaaagatgtcttcgtcccacgcacacacatttgtaatttgtgtccatttgctatttcccttcttctataatcttcaaattatatagttatgcattgagttccctatgcatctcacccatctcctttatctcagccttctcatactttgccattctcttctttctggaaataaccagcacaacaattccagcaacaactgctatcaccacaaccacaataacagcaataacaccggcttttagaccctgcattgagaattcaggtgctttttcatcaacataataaattaaagtttgaccaggatccagatccagttgtccccat

SEQ ID NO: 15 - DNA, 561 bp, Homo sapiens
  misc_feature 33, 39: n = A,T,C or G
ggtactctcagtgtgttctggtcatcttgtggnttagtngtagaagcaggtgtgtctcttgcctctgcttgcctcctactgcacactcagcacccaggactggaatcaccgactactgaatctcctacatgtattgctgctacttcaagctcctccacttgaaaccttatgattttcccaaggggagatgggacagtgtcatctaaatattccgaatgtttggccttctgagaaaagagcttctagtaattgaaccatgggaaacccagcttctggagggttggccgtggggctgtgtacatgtgtgtgcccaggggtgagtgtttctcaggattcctaacgattcaaattaccgttgagtatatataaagaatgagtctctgtatggaagaacaaatgtgtgcattcacccccagtcacaatggtctccattgcatttcaaaggagaggatcagactatctgaatataaacacaatctgatgttaatttattctaagaacaccatcattttgattgtcctaaagaattctgcctttgtgaataccgtgttaaattttttt

SEQ ID NO: 16 - DNA, 592 bp, Homo sapiens
  misc_feature 40: n = A,T,C or G
aaatattctagtgctttcatcaggacgcttgtattggggncaaaaaacctcagggtaagccactttaagataagatccaggcaaccaataactccttctttttcactctccaagtgatcaaccataacagcaagggctttgttatgatgctgaaagtctaagtgaaacatctcatcttgtaaccatttagccacacagctagacatttgagtctttagttgctcaatgtattcatcccgtggggtagtaaaattccactttagcaccttcaatcctttttcatctttcatcctttgctcttttccatttggaacaacaataaaaataggcccggatttgtcttcatcctcctttaagctggttttgcttggcatcttcttcccttgtgcactctttgctttagaggataatcctggagctttggccttttttggatcaggtttgggttctgtactgctggaaatacaatcttcagcaggtgctgatgcaggctggaatttggctggagcggaccctcccattggtttagaagttgctttagtgggtggagcaggcttggctggcatgttaactttggctttctctagcatgg

SEQ ID NO: 17 - DNA, 459 bp, Homo sapiens
attgtcctaggtgagaggatccattcccaaaacggactggggcaaaaactgagaagtaggtagatccttgatggtctgtattgccccggatcctcttaggtctcgcaggctgtctatggcttgctctggtgatattgtgtcagataggtatagtaggagacaagcagctacaagacaagatctcccaagtcctccatagcagtgtattaaggtttttcggtaatttttaaggcaggttgtaagctcttccattatttcacagcagctggctatgtcaggagtccctccatctgcgattggatgatgatgggtgataattccacattgctggtagagatccagaaggtttgggactctatattttgacagttcccctctggtgcagaaaacaaatatgtcttgtataccacagctctttagttcttctgtatctttttggacatttcttctaacatcttt

SEQ ID NO: 18 - DNA, 104 bp, Homo sapiens
  misc_feature 54, 74, 88, 94: n = A,T,C or G
aaaaactgttactccccctcacccactccctccttccccatttgttcccttcanactcaggggcttcaccaatnccatcccaaaacanggtcanacactgccca

SEQ ID NO: 19 - DNA, 501 bp, Homo sapiens
  misc_feature 430: n = A,T,C or G
cctgggcttgaaatttgctgagctggtgtataccggtttctggcacagccctgagtgtgaatttgtccgccactgcatcgccaagtcccaggagcgagtggaagggaaagtgcaggtgtccgtcctcaagggccaggtgtacatcctcggccgggagtccccactgtctctctacaatgaggagctggtgagcatgaacgtgcagggtgattatgagccaactgatgccaccgggttcatcaacatcaattccctcaggctgaaggaatatcatcgtctccagagcaaggtcactgccaaatagacccgtgtacaatgaggagctggggcctcctcaatttgcagatcccccaagtacaggcgctaattgttgtgataatttgtaattgtgacttgttctccccggctggcagcgtagtggggctgccanggccccagctttgttccctggtccccctgaagcctgcaaacgttgtcatcgaagggaagggtggggggcag

SEQ ID NO: 20 - DNA, 362 bp, Homo sapiens
ccagtttgtgcagttccagtagtgactgattcacatttttttccaaatgtaatgcacactccattgcattcagcccgctctcccagtcatcacagtctggtttcttgatatcctgaaggaagattcggccacctcgttggttctgcagcttcatcagtttctcagcatgttccctctcctcatgagattggtgaagaaagtatttggcaaagttcttcaaagccacatcatcgcggtcaaagtagtaagacatgggcaggtaaacgtaggaggcgtagagctccaggttgatctggcggttgatggcggcctctgagtcctggtggtagttctggcgcacctgcgaggtggacgcggtcgtc

SEQ ID NO: 21 - DNA, 463 bp, Homo sapiens
ctgatctacgagtctgccatcacctgtgagtacctggatgaagcatacccagggaagaagctgttgccggatgacccctatgagaaagcttgccagaagatgatcttagagttgttttctaaggtgccatccttggtaggaagctttattagaagccaaaataaagaagactatgctggcctaaaagaggaatttcgtaaagaatttaccaagctagaggaggttctgactaataagaagacgaccttctttggtggcaattctatctctatgattgattacctcatctggccctggtttgaacggctggaagcaatgaagttaaatgagtgtgtagaccacactccaaaactgaaactgtggatggcagccatgaaggaagatcccacagtctcagccctgcttactagtgagaaagactggcaaggtttcctagagctctacttacagaacagccctgagg

SEQ ID NO: 22 - DNA, 608 bp, Homo sapiens
  misc_feature 598: n = A,T,C or G
cctgtcctctgggagtgacctttattagtccaccccttggagctagacatcctgtacttagtcacggggatggtggaagagggagaagaggaagggtgaagggaagggctctttgctagtatctccatatctagacgatggttttagatgataaccacaggtctacaagagcgtttttagtaaagtgcctgtgttcattgtggacaaagttattattttgcaacatctaagctttacaaatggggtgacaacttatgataaaaactagagctagtgaattagcctatttgtaaatacctttgttataattgataggatacatcttggacatggaattgttaagccacctctgagcagtgtatgtcaggacttgttcattaggttggcagcagaggggcagaaggaattatacaggtagagatgtatgcagatgtgtccatatatgtccatatttacattttgatagccattgatgtatgcatctcttggctgtactataagaacacattaattcaatggaaatacactttgctaatattttaatggtatagatctgctaatgaattctcttaaaaacatactgtattctgtgctgtgngtttcatttt

SEQ ID NO: 23 - DNA, 722 bp, Homo sapiens
  misc_feature 638, 663: n = A,T,C or G
aaaagaacatgaggtcaaaaatcagagctcgaaaatctactgcttcatagctgtgtgaccacaggcaaattctttttgcctcagttttttcatcctaataatgaagaatatcttatttgctttggagggctataagacatgatgagatataataaacataaggcactgagatacatcatagacacttaattgttgttagctattatattacttatcttagggttttccttcatggtattttgttggaaatgataaaaaaataaaacaaatatgtaagggcttgtaaaacccaagattcagtatacctactgcttctagctttaattctaggctctgccatagttaggatgtttactcatctgtagttcaaaactcacacagctcaagactgacacagctcacaattcagaagtcatgtaggcacctcacagcctcgttccttgcccagtctccaaactcactccttccttgactgtgtttctaatactcaggctagaggacagcaggctctagccttctcattatgtatataatgagaatactgtatttcatttaggccagaggaaagtagacacatataatctgagaataatttattcctaggctataggaatctaccatgagcttattcaatgganggacttgaggaaaagcacacccacnaaaatcaatgcattaccttaactttaataagcttctgcggattcttctcctaccccggt

SEQ ID NO: 24 - DNA, 556 bp, Homo sapiens
  misc_feature 37: n = A,T,C or G
aaaaagcctcttcctgatgatcccaactcagaggtcngtgtttaccaaacaccttggtcataataatgtcattagtttctccatttttattttctgaactgtacattcacaacttatgtttctttgagattaatagatattgggggaaaaacgcctttttaggaaaattatagtgaaaatttgacagttgattggcataatttcttgtttgaatgctgcctccattatataggtccttccaggaactcaaacactgtaagtgaaatatgggagtatagtttttattatttcttcttttccttttgttttcataatataatgcagtttgttcaggaaatcagcacaaagcctgatagtactttactaaaatgactgcattctttggattccttcagtctatggttcaagtcactaaagattcatttttgttgagtccttatgagaaacagtagtatgaatcttgacggtttctgcccgtcctaatggcagagctctctgacttgggtgtatgctgccaggctgggtactttcatactttgttttcttgttttgcttt

SEQ ID NO: 25 - DNA, 436 bp, Homo sapiens
  misc_feature 301: n = A,T,C or G
aaagttctctccactcttcaagcctcgaccaccagataccaccactttggcacctgttagctctggtcgatcactttttgttaatttctggtcaagccactctgatatttccactggtgaagtacttgatgccttttctgaactggcactaccgccacttgttgctgcagcatcaaaggatgttccacggacagaaaacactttcactttctcatcacacttcactgtacatagagcatttcctgcataaatagttctcacaaatgtgtcaggtgacttgattgcaatgatgtcagaaatnggggcaacctcaagtttggctgctactctgggcaaaaggttctttccgaaggcagatgctccagcacagatgtgtgtgtaattgaactgcttctgagttgccaaaatcaatggtgtcagttcctctggaagtagg

SEQ ID NO: 26 - DNA, 709 bp, Homo sapiens
  misc_feature 39, 588, 609, 669, 687: n = A,T,C or G
ctgtaaggaacttcacccggatgaaattgacaccgactntgcctacattcttttctatgagcagcaggggatagactatgcacaatttctgccaaagactgatggcaaaaagatggcagacacaagcagtatggatgaagactttgagtctgattacaaaaagtactgtgtgttacagtaaagctaccactctggctgctagacagcttggcggtgagggagatgactccttgtagctgacatttggcaaaagcgtcactgaaaggcaagctaaatgtagttattttatcctgtggccctgaagcacaaaataaaaattctaattaaaatagttaactttaagagtagtaatcattttattttgaagtctcatacaagctctccgatagagaactttcaggcagatcccaccattagcctgtaaacaaaaggtttggcaccagccacctgggaccaaataagaattcaattgtgcttgtccagatatgaacaaatatgtagtgagtatagagtttaccataatcataacaaatattaaagatttccttggagtcaaagtaaaaaacaaacaattataatgttgtctanggacgacatgatatgctcctnctttttcctgaagttttattcattatattgacaagatggagaaagcaagatcacgaaggngtgccaatgatcttaagnatggccaaggattttcatttat

SEQ ID NO: 27 - DNA, 689 bp, Homo sapiens
  misc_feature 605: n = A,T,C or G
cggaagtgtaggttacggtctgagacatcaccgccaagctgggcatcggggagatggccgagactgaccccaagaccgtgcaggacctcacctcggtggtgcagacactcctgcagcagatgcaagataaatttcagaccatgtctgaccagatcattgggagaattgatgatatgagtagtcgcattgatgatctggaaaagaatatcgcggacctcatgacacaggctggggtggaagaactggaaagtgaaaacaagatacctgccacgcaaaagagttgaaggttgctaataatttatactggaatctggcatttttccaagccaagagaagatcgaatggctttttgcagctaactactatgtgtagacaggttttatattataaagtatgcattcttatcacctagtatatagttagtttgtagagtgatttccccccagtttcttgaacatggtatcttcacatcttggaccttggtcagttgtgctattcattattaaacactaaaactttggcggttcttgcataacattgtcagattttttagtgtatttctgtgaagtcattttttttcttgtcattccttttgtagtagttgntgtttggataaaagttgatgtgtgattttttattaacaaatagtaacccttcaattatagttagtctttggtgaaataagatgt

SEQ ID NO: 28 - DNA, 619 bp, Homo sapiens
  misc_feature 578, 595: n = A,T,C or G
ccagtggaccagggagttgggggctgcaagcagggctgctgcggcgagagagctgctgaagtcggtggctcggggcgggatgcgcgcgccaggggtctcccgccattatttcctcaggcatgtggcgtcatagtagaattaatcaaaagcaagaaaatggctggaagagctgtcttgttggcaggacctcctggaactggcaagacagctctggctctggctattgctcaggagctgggtagtaaggtccccttctgcccaatggtggggagtgaagtttactcaactgagatcaagaagacagaggtgctgatggagaacttccgcagggccattgggctgcgaataaaggagaccaaggaagtttatgaaggtgaagtcacagagctaactccgtgtgaggcagagaatcccatgggaggatatggcaaaaccattagccatgtgatcataggactcaaaacagccaaaggaaccaaacagttgaaactggaccccagcatttttgaaagtttgcagaaagagcgagtagaagctggagatgtgatttacattgaaagccaacagtgggggccgtnaaagaaggcaagggcanggtgtgaataccctatgcccacca

SEQ ID NO: 29 - DNA, 535 bp, Homo sapiens
cctgaatgctcagtgccttatttggctttcaggggtcttgcggtgtcacccaggctagagtacagtggtgcaatcatagctcactgctgcctcaaactcctagactcaagcgatcctcctgcttcagcctcccgagtagctgggactacaggtagatgatgggctccacgggaacagagcaaacgttcgctcctgctcctacacggtgtttcctctaaacctgaggctcagccgacttgtcatcacttaaaacccaattcagagcggggggcactgccagtgaatagttcatcaccgactcagtttccccatgtgtatgctgtggtattggatcagcaacgagataagaagatctctcccatttccaagcgtctatgatgattctgaggcacaaggtcacatttgacagtactaggaaacccaggaaacaagaagcaaggatgacaaaggctgtgtctgcctgggcagacgatctatttggacaagataatagacccaggcatggacatgctctccaagaaagatgccctgacag

SEQ ID NO: 30 - DNA, 456 bp, Homo sapiens
  misc_feature 345, 415, 416: n = A,T,C or G
cctgcagcctacctgaccatctctttagctgtcaccaagaaaataaaccccactgtctctctagcttggcccttgtctttcccttgcccctgccatagcatgttcattaggggattccttcctccccttcatctcacaggggaagggagaggaaagagttgttctcccactggaaggggttctgccttctgaggtgacatccaggaagctgtccccattcccttctcctttagatgctagaaacacattttgattctgatcatggggtgggggagagaggaaaggagggaggggagaagcccagcagaagctgagccaggcagaggggaaagaagctgatatgangaagggtctgacaggccacagcccttgcagccggagggctttcccacactcaagagaggggccttacagnncctctgacacccctcccccttcccctcgctccctttgttg

SEQ ID NO: 31 - DNA, 495 bp, Homo sapiens
ttggacccaagagaagactgcagcagactacacagtacttcttgtcaaaatgattctccttcaaggttttcaaaacctttagcacaaagagagcaaaaccttccagccttgcctgcttggtgtccagttaaaactcagtgtactgccagattcgtctaaatgtctgtcatgtccagatttactttgcttctgttactgccagagttactagagatatcataataggataagaagaccctcatatgacctgcacagctcattttccttctgaaagaaactactacctaggagaatctaagctatagcagggatgatttatgcaaatttgaactagcttctttgttcacaattcagttcctcccaaccaaccagtcttcacttcaagagggccacactgcaacctcagcttaacatgaataacaaagactggctcaggagcagggcttgcccaggcatggtggatcaccggaggtcagtagttcaagaccagcctgg

SEQ ID NO: 32 - DNA, 648 bp, Homo sapiens
  misc_feature 434, 604, 622: n = A,T,C or G
tggcagccaaaagatttttcttagtgctttggagacattgcataggtgtaaaattaagataccagaacttcattctgttcttgttgaagctgttgttgtggtgattcatgagcagtaagctggagttagagtggaagaagggtttaccaaaattcttcctacagactagttgcttacagggtttctttgagaggcttaaaaatttcaaaagtattatttaagccactctaaccctgcatgaaaaattggagttagaaatactgatttctgagaccacgtataccagtgaaaattagcttctgagtaaatttctaatttatgccctgccttatttagcctcgctatatgtaacacatggattattttttccctctagtttttaactatatcctagattaaaaccagcatatgctaagaatgtttttacattctgnttcctcctgtgatctttctgaaccaataataaacagtcaactgtgatgctttttagtatgaacaatgataagttttctaaaatctgaaaatcaatacctgagtatgtgatgccggcaatgcattcttctagataagcactaaaccaaagtatggaccctccatttattgnctttaagatttacccccncccgggcgggccgcttaggggccgaa

SEQ ID NO: 33 - DNA, 489 bp, Homo sapiens
  misc_feature 39: n = A,T,C or G
aaacatgagtagatctatgacttctcaaagccgggtcangaatgtccataaaatgctaggcattcctatttccaatattttgatggttggaaattatgcttcagatttggaactggaccccatgaaggatattctcatcctctctgcactgaggcagatgctgcgggctgcagatgattttttagaagatttgcctcttgaggaaactggtgcaattgagagagcgttacagccctgcatttgagataagttgccttgattctgacatttggcccagcctgtactggtgtgccgcaatgagagtcaatctctattgacagcctgcttcagattttgcttttgttcgttttgccttctgtccttggaacagtcatatctcaagttcaaaggccaaaacctgagaagcggtgggctaaaaaaagggcctactgcaaaccacccctccatatttccgtaccatttacaattcagtttctgtgacatcttttt

SEQ ID NO: 34 - DNA, 501 bp, Homo sapiens
ccagagtattcacagagagccaaatctgtcactggcaaaccgcctttactacctctaacctgcagaagacgatgcagccgcttttctttttgaaatgactttgggatttttttaagcttttatttactttttttttaactgttatctttctggatgaaacttgggaaggggattaggagatctagcattttatttctagcattgctattcaccggcttccttattttatatgtaaaaattaagattttatattttatcttcttgtttctcatagatattttgtgagcatttttttgtttattttgaagaaatgtggataagatacttggtagtataaaacagactctctgagagtatttgaaatgtgtttggagatttacttaaacgtactttcaggagtgagcaagtcctacttataaacctatattaactttatttttgagatacctgttttgaatttacctgccccgggcggccggctaagggcgaaatctgcagaat

SEQ ID NO: 35 - DNA, 558 bp, Homo sapiens
  misc_feature 477, 529, 543: n = A,T,C or G
ttgaatgaattaatgatggcttctgagtcaactttactggctcaggaaccacgagagatgactgcagatgtaatcgagcttaaagggaaattcctcatcaacttagaaggtggtgatattcgtgaagagtcttcctataaagtaattgtcatgccgactacgaaagaaaaatgcccccgttgttggaagtatacagcggagtcttcagatacactgtgtcctcgatgtgcagaagttgtcagtggaaaatagtattaacagctcactcgagcaagaaccctcctgacagtactggctagaagtttggatggattatttacaatataggaaagaaagccaagatttaggtaatgagtggatgagtaaatggtggaggatgggagtcaaaatcagaattatagaagaagtatttcctgtaactatagaaagaattatgtatatatacatgcagaaatatatatgtgtgtgtgtatctgnggatggatatatgtatatctcttcctatatatatccatagtggacttattcngaacatagatatgnattcaggcttgtctt

SEQ ID NO: 36 - DNA, 491 bp, Homo sapiens
  misc_feature 416, 445, 467: n = A,T,C or G
aaagaataaacatttaatgtgagtaacattttggttaaaataaatatcatagtaaatgttaacagcaacacctgaagtatatggatacaagaaaggtgttttgtaatagatactatgttgaatggtaaagcattcatgaaatggctgtaatatcttactaaatttacaatcattgcacattgttgagcactttatttatatagagatacccttcatccaccattcctaaaccttaccatacaaaacaaagttactccatattttcacctgggtaactggtaccaatgtctaaataaggtttagaatagatatagctttcattttactgctcctcaaatcaattcaaaagtttaacttaatcaatataaaatttacttatgaacacatataaagaacattttataggtgactatatnaattacgagcttcaaatcatcttcatagntctttgaaattattccattcanaattagaaatttgattgttacaca

SEQ ID NO: 37 - DNA, 593 bp, Homo sapiens
  misc_feature 593: n = A,T,C or G
aaatcacttctatcttctgtacttaagaactcaagtatagaaataaactgtgggctgaagtaacattgtaacctgctcccaacatgactgcataggtgtctaaggttaagtgtgaagattactgtgaggactcaagttacttgactaatcaatcccatttgaatttcaatccaagcagcgtattttacacacacctgaaggaaatatcttcagtgtgttcatgtgtgtgtctatgtgcatgtatgtgtaggggataggtgtaattagggaagggctgaccgaacaacattgataagtacatgctagaagtctgctgttgttggtaacacagaaacatacacagtcttcatattcaaagtcttcacggggatgtcttctgtaatttcccgcgtttgggtctcattcagaaacagctttagcttcctgctccgaaggccaaacaccttggctgcttcatacagaagaccttggtgggtgagtccattctgcccaagtgggttttcaagcaggagagtgcccactgtccccattaaacactcttgtggctctgcattcaggagctgtaggttggaccttttaaagctgaagagtgn

SEQ ID NO: 38 - DNA, 649 bp, Homo sapiens
  misc_feature 617, 636: n = A,T,C or G
ccagtatcgttttggtacttttgtacctctatctgactccatgcccctgcaagtgtaaaaccaagagacagaaaaatatgctacaccaaagcaatgcccattcatcgattctcagtcctggccctgctagtgatgcctccgctgatgaacggaaggcaggtgcaggtaaaagagtggtgtttttggaacccctgaaggatgctgcagcagggcagaacgggaaagtcaggctctttcccagcgaggcagtgatagctgagggcatcctaaagtccacgagggggaaatctgactcagattcagtcaattcagtgttttctgacacaccttttgtggcgtccacttaatttgtgcctatatttgtatgatgtcataatttaatctgttcatatttaactttgtgtgtggtctgcaaaataaacagcaggacagaaattgtgttgttttgttctttgaaatacaaccaaattctcttaaaatgattggtaggaaatgaggtaaagtacttcagttcctcaatgagccagagaaagatggggttgttttccaaagtttaagttctagatcacaatatcttagcttttagcactattggtaatttcagagtaggcccaaangtgatatgactcccattgncccctttatttta

SEQ ID NO: 39 - DNA, 312 bp, Homo sapiens
ctgaagaaaaagcagtcatcgattttaagtccaatgggcacatttatgacaatcggatagttctgaatggcatcgacctcaaagcatttcttgatagtctaccagatgtgaaaattgtcaagatgaagtgtcctgatggaggagacaatgcagatagcagtaacacagctcttaatatgcctgttattcctatgaatactattgcagaagcagttattgaaatgattaaccgaggacagattcaaataacaattaatggattcagtattagcaatggactggcaactactcagatcaacaataaggctgcaa

SEQ ID NO: 40 - DNA, 386 bp, Homo sapiens
  misc_feature 34, 40: n = A,T,C or G
aaaaagaacattatatccagatataaacttaacngatgangtattacaaaatatgaacatagatagttttgtttcccattataattcccagcattttcaccctgtcctgttcatacgagtcaattctcttcttcaattcctgtcccatcagccgtctgctgaaaaacactgctttgtcttggctaaggctgcacaagttcagtctcgcactggctcagcctcccctttcagcaacaccatttccctaccagggtacaagctgtttcctggtgctctaggtggagtctgatttggcattcgttccccatccctagtgctctttaagctggtacctgaagtcacagaaacgcttttgcttgctaattatttacaccagcagtgcattt

SEQ ID NO: 41 - DNA, 191 bp, Homo sapiens
  misc_feature 95, 119, 126: n = A,T,C or G
ataaaggactgtgtggggaaagtaccaaataaatgaggtaaaaaggaagggtcatacaaagagggcactacaccagcttcttggcctcaaagaanctcttgaggtgacgcatctgccanatgccantgaggatgaggatgacagtctgagcaatggaccaccataggaccctctggttggtgctctcgctc

SEQ ID NO: 42 - DNA, 325 bp, Homo sapiens
aaatttgaccaaaaaaaatttattgtacaattacccaccactggatttgactcagagaggacccccagagggtgtctccatcttccctatttattttcagcccttgagggcttcattgtagatcaaagccaaggcccccaggaaggtgacatactcctggaagttcacctcctggtccttgttccggtccaagtcttccatcagccttgcaatttcagcatcctgcagcttcgagccaatggtgagctccttctggatcagctccttcagctccttcttgctcagggtgtgcttgtcaccctccctgccggagtacttgtggaag

SEQ ID NO: 43 - DNA, 456 bp, Homo sapiens
  misc_feature 304, 306, 326, 329, 357, 370, 434, 436: n = A,T,C or G
aaaaagcctcttcctgatgatcccaactcagaattcactgtttaccaaacaccttggtcataataatgtcattagtttctccatttttattttctgaactgtacattcacaacttatgtttctttgagattaatagatattgggagaaaaacgcctttttaggaaaattatagtgaaaatttgacagttgattggcataatttcttgtttgaatgctgcctccattatataggtccttccaagaactcaaacactgtaagtgaaatatgggagtatagtttttattatttcttcttttcctttngntttcataatataatgcaggntgntcaggaaatcagcacaaagcctgatagnactttactaaaangactgcattctttggattccttcaagtctatggttcaagtcactaaagattcatttttgttgantncttattgagaaacaacaagt

SEQ ID NO: 44 - DNA, 301 bp, Homo sapiens
ccaagagctacaatgagcagcgcatcagacagaacgtgcaggtttttgagttccagttgactgcagaggacatgaaagccatagatggcctagacagaaatctccactattttaacagtgatagttttgctagccaccctaattatccatattcagatgaatattaacatggagagctttgcctgatgtctaccagaagccctgtgtgtggatggtgacgcagaggacgtctctatgccggtgactggacatatcacctctacttaaatccgtcctgtttagcgacttcagtcaactacag

SEQ ID NO: 45 - DNA, 706 bp, Homo sapiens
  misc_feature 34, 35, 39: n = A,T,C or G
aaaaaataaatgattatgatgtaattattacttnncagngtgttttgcaataacttcaacctgttaagagatacaaagaactatattaaactgggaactacaataacgtacacagaaccctcttcaaagaaattaaatatattagatgttaaaatgtggtagaaagatgcagctttcccaaagtagtaaagtactgcacatatgggttttgtggcagtccttggaaatatcctaggtagaacttaatgtagaaataaaaaggctaccacatattttcaatccaagtcatttttacaagaaaaaaaaagtgacacaaaataatgcactttaagttggtagcatacacaaggttattttttagcctaacatagacaggccaaatcattgaaataaaaaaaatatagaaaaacataaaagcccattaacttctgaattttgggaaagaaacaagaaagagcccaaagttttcagataggcacacataatttagattagaaatgaaaatgggctttaagccctataaatattgttttccaagaaaataagttttgaaagtgcaaaatgacaactcaaaaaggtcccctttccacctcatgcaggcaaaggacatttaaaagcacatccaactaaatcaaaaaaggggaggattaggaaatcacactagttcatccttcattatcagggctgggcttcaaacccttgaatg

SEQ ID NO: 46 - DNA, 227 bp, Homo sapiens
atttatttctattaaaatatagaagttattgcaaaaccctaactgtaaaaacgcaccaatataatcggactttgcatacagtagctaagagaatccaaacatttcagtgagacagtgaatttgcctggtagaacgctgacaaattcccatccacttgccctcttgaaaataaaaacaaaattcaaaacaaatcatacagctagaattttgatatctgaaatattttt

SEQ ID NO: 47 - DNA, 342 bp, Homo sapiens
gtctccacgctgtgcggagagggctctagcccctcagtcggacttctccttctccttcatgtgcaagaagacgatgctgaagatgaagagccccagcatcatggagaaggcgctggcgtagtaggggtaggccgaggggatgaagcgctcatactgcgtgtgctggagtggccgcacggatacctgagtggaagagtacaggtgtgtgtagcctagccggttgtaatccactttaaactggaatacaccatacacgtcgggcaacttgaactgaacactgtatttgccacctttcttcttcaggaaggtcctcacaaaaggatcaatgcggacaaactccag

SEQ ID NO: 48 - DNA, 203 bp, Homo sapiens
  misc_feature 17, 26, 38, 52, 98, 120, 125, 149, 160, 163, 182: n = A,T,C or G
ggataatattcatttanccttctganctttctgggcanacttggtgaccttnccagctccatcagccttcttgtccactgctttgatgacacccaccncaactgtctgtctcatatcacnaacancacctccgccgcaaccacactaanggcgaattctncanatatccatcacactggcgncccctccaccatgcatctaga

SEQ ID NO: 49 - DNA, 367 bp, Homo sapiens
  misc_feature 3, 9, 33, 36, 42: n = A,T,C or G
ttngccggnagtacttgagatccacagtcacgnganctttgncggtctctttacatctgcccacttcattttcattctttccttcccacacaatggtttttccaatgtgcaagaatgatttctcgacaaattcccggacactatggacctccccagtagctataacgaagtcctccggctcatcattctgcaacatcaaccacatagcctccacatagtccttggcatggccccaatctcgtttggcatccagatttcccaaactgaaacattccagttgtccaaggtaaatcttagctactgaccggctaatttttcgagtaacgaaattagctcctcttctgggactctcatgattgaagagaat

SEQ ID NO: 50 - DNA, 685 bp, Homo sapiens
  misc_feature 2: n = A,T,C or G
tnacacatttgtgagaactatttatgcaggaaatgctctatgtacagtgaagtgtgatgagaaagtgaaagtgttttctgtccgtggaacatcctttgatgctgcagcaacaagtggcggtagtgccagttcagaaaaggcatcaagtacttcaccagtggaaatatcagagtggcttgaccagaaattaacaaaaagtgatcgaccagagctaacaggtgccaaagtggtggtatctggtggtcgaggcttgaagagtggagagaactttaagttgttatatgacttggcagatcaactacatgctgcagttggtgcttcccgtgctgctgttgatgctggctttgttcccaatgacatgcaagttggacagacgggaaaaatagtagcaccagaactttatattgctgttggaatatctggagccatccaacatttagctgggatgaaagacagcaagacaattgtggcaattaataaagacccagaagctccaattttccaagtggcagattatggaatagttgcagatttatttaaggtagctcctgaaatgactgagatattgaagaaaaaatgaatcaggatcatgccttaaaaagaaaacttttgttaaaagtattccacttgaaatcacagatatttgtgggtattataaccaatcattggaaaagcatggagagct

SEQ ID NO: 51 - DNA, 315 bp, Homo sapiens
  misc_feature 1: n = A,T,C or G
ntttgtccggcaccctgcccacaggctgagctcagccccaggccctttcaggcatctagacactcccatagcctgtcgggctggggcaaggagatcccaggtcacacatactccttggaagagttggacttagggtaagagcggggtgcacggtacccagccttgctctcattcccaggacaggaacaggagagcagtgcacctcccaggatgactagggcagaccctgcccagccaataaagatggcagggccaaactcatacttaatgttggtagggatcaaagggttataaaagtctgtgacaatctgatgg

SEQ ID NO: 52 - DNA, 358 bp, Homo sapiens
  misc_feature 35: n = A,T,C or G
tgcatccacagacttcaactacatgattacttctntgcccattcttctctttcttttctttcccgaataacctctttcagatacggttcaaggtagaaattttcctcttcatatttggtccactgctctttaggcaagatctgatgcttcaagttcaggtccagtgccctcttaatgcgaaacatcctgtcattataaaggttctcaggaagtcttcttatggcttcttttacatcttcatcctcgtatattgtatcatctcgcattaaccccagtttattgaatcctgcagcattgtaataccattttcgaataccatccagccacttgcctgatgctgaaacggcctgcttaccag

SEQ ID NO: 53 - DNA, 407 bp, Homo sapiens
  misc_feature 36, 41: n = A,T,C or G
ccaagagatcagcacaacctttgcaggctgacttgntaagnctgacagtgacaaacttgtgagcttactgcagtcagtcacagaggctgttctttttcacacaccccttcatgcccggctttccccatatccacatgcagagggcgagctcataaaactacagggaagcgtgaaatgatggctttggtagctgtttactgggtaaccccactgtgacactgtccttttcacgtgatgtggaaacctacttctgtcctccaaaccatgaaatgtgtcatctagactgcagagtacttgagtgctttgcctcccgatatgccagagcttgtggtccaaagcccattcctgtgtgtccgtcctgccatttagccacagaaggctgcggagtgaggcggcagctagcctgg

SEQ ID NO: 54 - DNA, 571 bp, Homo sapiens
  misc_feature 2, 37, 43: n = A,T,C or G
cnacaaacagacctaaaatcgctcattgcatactctncaatgnagccacatagccctcgtagtaacagccattctcatccaaaccccctgaagcttcaccggcgcagtcattctcataatcgcccacggacttacatcctcattactattctgcctagcaaactcaaactacgaacgcactcacagtcgcatcataatcctctctcaaggacttcaaactctgctcccactaatagctttttgatgacttctagcaagcctcgctaacctcgccttaccccccactattaacctactgggagaactctctgtgctagtaaccacgttctcctgatcaaatatcactctcctacttacaggactcaacatactagtcacagccctatactccctctacatatttaccacaacacaatggggctcactcacccaccacattaacaacataaaaccctcattcacacgagaaaacaccctcatgttcatacacctatcccccattctcctcctatccctcaaccccgacatcattaccgggttttcctctcaaaaaaaaaaaaaaaaaaaaaaa

SEQ ID NO: 55 - DNA, 473 bp, Homo sapiens
tcttagcggctgctgttggttgggggccgtcccgctcctaaggcaggaagatggtggccgcaaagaagacgaaaaagtcgctggagtcgatcaactctaggctccaactcgttatgaaaagtgggaagtacgtcctggggtacaagcagactctgaagatgatcagacaaggcaaagcgaaattggtcattctcgctaacaactgcccagctttgaggaaatctgaaatagagtactatactatgttggctaaaactggtgtccatcactacagtggcaataatattgaactgggcacagcatgcggaaaatactacagagtgtgcacactggctatcattgatccaggtgactctgacatcattagaagcatgccagaacagactggtgaaaagtaaaccttttcacctacaaaatttcacctgcaaaccttaaacctgcaaaattttcctttaataaaatttgcttgtttt

SEQ ID NO: 56 - DNA, 396 bp, Homo sapiens
  misc_feature 40: n = A,T,C or G
tgctggcagtaactggcaagaagacaacaagaccctagtnctggttccaatttaggtggtggtgatgacctcaaacttcgttaattaatagcacaacagatgtgtgctgcccatctttacatacacattgcttctagttggcagaaataattgattaaaagaccagaaactgtgataactggaggtactacggtctatttctcaaccttaggcagtaatagacatcacaaactgccatggttttgcactatgattataatacctgcatttctaattttttaagcatgtagccagtaataatttgaagttttttttctatgcaagcttaccttgttggcattattttagggagttgaaactatcaactgtaaagctccttttcttccactttaattt

SEQ ID NO: 57 - DNA, 500 bp, Homo sapiens
ctgccccccacccttcccttcgatgacaacgtttgcaggcttcagggggaccagggaacaaagctggggcctggcagccccactacgctgccagccggggagaacaagtcacaattacaaattatcacaacaattagcgcctgtacttgggggatctgcaaattgaggaggccccagctcctcattgtacacgggtctatttggcagtgaccttgctctggagacgatgatattccttcagcctgagggaattgatgttgatgaacccggtggcatcagttggctcataatcaccctgcacgttcatgctcaccagctcctcattgtagagagacagtggggactcccggccgaggatgtacacctggcccttgaggacggacacccgcactttcccttccactcgctcctgggacttggcgatgcagtggcggacaaattcacactcagggctgtgccagaaaccggtatacaccagctcagcaaatttcaagcccagg

SEQ ID NO: 58 - DNA, 258 bp, Homo sapiens
  misc_feature 258: n = A,T,C or G
ctgcctcacaccgccccttgtgctcgcctcataggtgtctatttggactctaagctctacgggtgacagatcttgtttctgaagatggtttaagttatagcttcttaaacgaaagaataaaatactgcaaaatgtttttatatttggcccttccacccatttttaattgtgagagatttgtcaccaatcatcactggttcctccttaaaaattaaaaagtaacttctgtgtaaaaaaaaaaaaaaaaaaaaaaaaaan

SEQ ID NO: 59 - DNA, 529 bp, Homo sapiens
  misc_feature 6, 495: n = A,T,C or G
ctgtanacttgacctcaaagattccatcctcaatagtgaggattgacacatcaaaagtgccacctcccaggtcaaagatgagcacgtttctttctgctccaacctttttgtctaagccgtaagcaatagcagcagcagttggctcattaataattctaagtacattgagaccagcaatagttccagcatctttggtagcctgacgctgagagtcattaaagtaagctggcactgtgaccacagcattggtaacagtcttcccaaggtaggcttctgcaatttccttcatctttgtcagaaccatagaagacacctcctctggatagaagcttttggtctctcccttgtattctacttggaccttgggcctgccagcatcattcaccaccataaagggccaatgtttcatatcagactggacaacagcatcatcaaatctgcgtccaatcagacgtttggcatcaaaaactgtgttggtggggttcattgcaactngattctttgcggcatcacccgatcaaccgttcaa

SEQ ID NO: 60 - DNA, 422 bp, Homo sapiens
aaagtacaaaatcaaatacacagatccagcagatccagatatgtgaaccatatatacatatctatacaaccattatttagactttcacaaacctatctatacattctaatttatctatcaacactatcccttaagtaaaaagcaacatatctcttaagtaggtttgttatcagtaacactatcgaatgtaaattattttcacttcatcacttgaaacggtagaaataggtacctcctagaaactggagaattaccaagcatatatccaatttgtatagatttcttaaaatacattctataggaataattaaccgaagaaactgccaatcaaagtttttgggcatatttaacaaaacttgagtcatgggaagacataaagttaattaattgcattacaagagttttgttttgactttggtttt

SEQ ID NO: 61 - DNA, 486 bp, Homo sapiens
  misc_feature 378, 461, 463: n = A,T,C or G
cctacagacttatttcttcttggacacacccacggtgcggccacggcggccagtggtcttggtgtgctggcctcggacacgaaggccccagaagtgacgcagccctctatgggcccgaatcttcttcagtcgctccaggtcttcacggagcttgttgtccagaccattggctaggacctggctgtattttccatcctttacatccttctgtctgttcaagaaccagtctgggatcttgtactggcgtggattctgcataatggtgatcacacgttccacctcatcctcagtgagttctcccgccctcttggtgaggtcaatgtctgctttcctcaacaccacatgagcatatcttcggcccacacccttaatggcagngatggcaaaggctattttccgccgccatcgatgttggtgttgagtactcgcaaaatatgctggaacttttcagggatcactananacatggctgcagcacaagcggcg

SEQ ID NO: 62 - DNA, 228 bp, Homo sapiens
ctggagactctgggccaggagaagctgaagctggaggcggagcttggcaacatgcaggggctggtggaggacttcaagaacaagtatgaggatgagatcaataagcgtacagagatggagaacgaatttgtcctcatcaagaaggatgtggatgaagcttacatgaacaaggtagagctggagtctcgcctggaagggctgaccgacgagatcaacttcctcaggcag

SEQ ID NO: 63 - DNA, 475 bp, Homo sapiens
ccagctccttgcaggttgccccagtcacagagcctccataaatgatacgggtgctctgagccaccgcatcagagacgttggacttcagccatcctcggagcttctcgtgtacttcctgggcctgttggggtgttgcagtcttgccagtaccaatggcccacacaggctcataggccaggacgaccttgctccagtccttcacgttatctgcgatgacctttgtctgctcgaaaacaaccttctcagtgatgccagcttccctttcatctagcttctccccaatgcaggcgattactccgagtccctctgccagagcatgggccactttctgcccaatcagctcatctgactccccaaagacatgccttctctctgagtgccccaggaccacccacgtggctccgcagtctttgatcatgccagggctgatctccccagtaaaagccccattagtcactttgtagcagttctgcgc

SEQ ID NO: 64 - DNA, 448 bp, Homo sapiens
ccaacggtggccgccgccttattgctgactgccacccaggactgctggatcctctggtaccactggatgaggggccgggacatactgactgcccctttgaccccacaagaatctatgatacagccttggctctctggatcccttctttgctcatgtctgcaggggaggctgctctatctggttactgctgtgtggctgcactcactctacgtggagttgggccctgcaggaaggacggacttcaggggcagctagaggaaatgacagagcttgaatctcctaaatgtaaagggcaggaaaatgagcagctactggatcaaaatcaagaaatccgggcatcacagagaagttgggtttaggacagcaggtgctgttccgagactcagtcctaaagggttttttttcccactaagcaaggggccctgacctcgggatgagataacaaatt

SEQ ID NO: 65 - DNA, 329 bp, Homo sapiens
aaaaatctcaaatgaaaaagtcttcgatacaatattgttaagctgtattataagtattgttacacagggttatgcaattcccggcctggagcatttttgaaattcaaattgtctgtcctgtggagcaggcagtgattttgttccaaaactttgtatacacatttggagaaaagtactttatattttcagtgttttgtctgattttaatgtccgttcttagccaagctgctagcaggtgttaattggatccctttccttcactgaaatggaagagtttataagcttacgttagtattgtaatatgtaaagtaagcccaacaaaaattttt

SEQ ID NO: 66 - DNA, 415 bp, Homo sapiens
aaacagattcttggactggtggttcatatccatcagctcgttcaactttagcacctgtctcgtccccagtggcttttccagaactactgccttcaccatgaagctccatgagctttcccaattcaaacttgggcttcttcagcatttttacttttctgacgaagacatcatggagaggataaatagattggcaagccttttctatgtcttttccaatgctgtctggaatcaatttattgaccacttctttcaagtcatttgtctgcacctctcgggtcatgatttccatcatcttcttccggatttggcggacctgttggtgctgagcataagaggtcttccgtatctgattgttgcgttttttagtaaaaccaacacagaacagacgaagcaagtaaccatcggtagtcttgac

SEQ ID NO: 67 - DNA, 316 bp, Homo sapiens
atacgccagcttggtacccgagctcggatccctagtaacggccgccagtgtgctggaattcgcccttgccgcccgggcaggtcctgaaggaagagctggcctacctgaagaagaaccatgaggaggaaatcagtacgctgaggggccaagtgggaggccaggtcagtgtggaggtggattccgctccgggcaccgatctcgccaagatcctgagtgacatgcgaagccaatatgaggtcatggccgagcagaaccggaaggatgctgaagcctggttcaccagccggactgaagaattgaaccgggaggtcgctgg

SEQ ID NO: 68 - DNA, 507 bp, Homo sapiens
ttctgctccatgacagatttcacctggtccttcaacagaggaagggtccccttctccagggcctcagccacaaactgctgctcttcagacagctctagcagggcatccaggaagtccagaatggcttttgcacgcgcttctaccaagaccccagcagcattaaaaaggctgcttaggagaggcttgtctgggtcctccatgtgtagctccccggaaatcaggacctcagatactctttgctctagatcctgccgaatatcctccttgccgaggcacttagcgagggagtttagcacatcttttctcttctcctctgtcaggtccttgaggacactctccatgtcctccaacttctccttcatgtttctggaatcctccgaacccaaagactttcctgtagaggcagcaattgagaacctgggccacccagcccaaaaggttttatttctaaggctctgttatttgtctgactgtcttctggagaccacctctttgtatcttcccttc

SEQ ID NO: 69 - DNA, 626 bp, Homo sapiens
aaatgcaaacaattcatttaccatttctttgttttagtgcatctgcattaaggctttgaattatttgacccaagattttacaatattaaaatctgactcaaaattttacaatgttaaaacaaataggtccacaaccatactacctactgtgtctcactgagtcagcatagagttaaagctcaacaccttaaggaaatggtagcagagacatttgctaatatctaagaagttacatatatagtttttaattaaaggatgtataataaaacaaatagcttagtggcaagaaattggtgctaataaacaaaaggtttttcaaaagaaattgtaacatctttggaaaactgtctggttctaagttcccacttcctttagttcccacggagttcatgcagatacatttcttaagacaatcttaaagtacactgtggatggaaatggaatgtacatccagaactagaggtgaaaactaagacctgggtgctgatagaaaaatcttcctgatttcagtcgtcacacatttgtgtcctggagtaaaggttctttggcctctcctggcgcttgtgtattatgaggatggctgtgactgccacagtgctttctccaactgctggaccttaagctta

SEQ ID NO: 70 - DNA, 494 bp, Homo sapiens
gttttaccctttctaaacactgtcctttttgaaagttttgaatatatccacattctattgaaaccttgaaactaaaaatttagactcttatcgtcatcttaagttcttcatgctactcttaacctcccaaaaagcagtatctaagtcacatacatgatgtcttgggcattttctgagccatggagaactctgaaaggaagaatcgctgcttttctcaagcaaatcggtttcttgatgtcttttggttctccttgcctgctcctgatgcttggaccccttttattgatcagagtgctctagaataatggatggtcttggatgatggataaatagggacagggacagttaaattgggagcctttcttacaaccttgatgggatttttccccccaagtttccttctccactgaaatgccacactaatgcttgttggattcatgaggtggacctgcccgggcggccaagggcgaattctgcagatatccatcacactg

SEQ ID NO: 71 - DNA, 294 bp, Homo sapiens
ctgcttcaagacctcagcttcatgggacttgcgtctttcttctgcagcttctaatttcttctgaatttcctccagggaaagatccttcttctttggaggggaaagggggaattctggaacagattcttttgaccgagggctgagaatcagctcaaaagcctggcctgaggcacgcttctccagttctttcacctggatatcagaagaagccatggtgaatagaagacaagcgacaggcagtgtattctgcacaatcaactgggataaggaaagtcctgctcagtccgagccgcc

SEQ ID NO: 72 - DNA, 329 bp, Homo sapiens
aaatttgaccaaaaaaaatttattgtacaattacccaccactggatttgactcagagaggacccccagagggtgtctccatcttccctatttattttcagcccttgagggcttcattgtagatcaaagccaaggcccccaggaaggtgacatactcctggaagttcacctcctggtccttgttccggtccaagtcttccatcagccttgcaatttcagcatcctgcagcttcgagccaatggtgagctccttctggatcagctccttcagctccttcttgctcagggtgtgcttgtcaccctccctgccggagtacttgtggaagatgg

SEQ ID NO: 73 - DNA, 527 bp, Homo sapiens
aaatatcacaagtaggtcttaagtgtcatctggcatcttctttctgtagccaggtaactcttagatcttattcatcagcctgctgaacagttcctttttcagagacatagataccatccaaaaatttcctgatatccttgtttttaactgttgtggcttgctgaatcaaagccgctgaatttgaaacaagctcaatgtcatttccttcaaggattaattcatctttctgggcttgagatactgaacaagcaacacctggtctcatccgaaccctgcggatgtatttttcacccaagaaatttcggatttcaacaagagacccattctcctggataacaacgttgatggggaagtgagcatacacagacctcatcttgtaacggaagcccagtgtaacacccttgatcatgttctgtacatgactacaaatagtccgaacggtagccagttcctttctgttaccccaccatttgtcaacccggagcctcttttttttctttccaagaaggctgagttctacattgatg

SEQ ID NO: 74 - DNA, 221 bp, Homo sapiens
aaaattttaattggctagctcttgcccttatatgactttaatgtctgtgagtcattcccagcttaaattaacaattgttagtattagtctcacacataagtgccatacattttatcctcatggatgtgatgcactgaaaagttagttgctctccttttttcttttttttgtcgtgcatattttatttctgtagtttctggttagctaccctaaagtgattt

SEQ ID NO: 75 - DNA, 312 bp, Homo sapiens
cgccagcttggtaccgagctcggatccctagtaacggccgccagtgtgctggaattcgcccttgccgcccgggcaggtcctgaaggaagagctggcctacctgaagaagaaccatgaggaggaaatcagtacgctgaggggccaagtgggaggccaggtcagtgtggaggtggattccgctccgggcaccgatctcgccaagatcctgagtgacatgcgaagccaatatgaggtcatggccgagcagaaccggaaggatgctgaagcctggttcaccagccggactgaagaattgaaccgggaggtcgctgg

SEQ ID NO: 76 - DNA, 334 bp, Homo sapiens
ctggcaagagacttcctgaggcacatcagctacgttggtcaatttagggcacggtctggttctgcagctttgaaaggtggattctttctattagcacactttacaagagggattgtaaaggattaactcagtcaccagaaacgaaacaccacttcagaaattcagagacctctgatcaacagaacagacatttgggctttaactgctaaagcagctacctacttggggaaaccatggcattctgctgcctggacagcaggaattaagagagatttcagagttactggcacgaggacaaagcctctcagctcgcttcaccttggcaaccttaaac

SEQ ID NO: 77 - DNA, 433 bp, Homo sapiens
aaaatccctcaaaaactgtttattatacaagtgagttttgagtcacgatgggcttatcggtaggatttctggtagcgagcgcgggcaccagggcctccaaactttttggactcgcagcgacgagggtcagctaccagcagggtccggtcatactggatgaggatgtctttgatctccttcttggaagcctcatccacatatttctggtaataggccaccagggctttggagatggactgacggatagcataaatctgggccacgtgaccaccaccctttacacggacacggatgtctacaccagcaaatcgctccttgccgagaagcagaactggctccagcagcttgtactgtagcgtgcgcggctcaatcatctccaggggccgcccgttcaccttgatgagaccattgccgcgtttgcagtgcgccacag

SEQ ID NO: 78 - DNA, 435 bp, Homo sapiens
aaaatcttgagggattgatctcgcctcatgacagcaagttcaatgtttttgccacctgactgaaccacttccaggagtgccttgatcaccagcttaatggtcagatcatctgtttcaatggcttcgtcagtatagttcttctccaggaactcgcgcactgacttggcaccccgacctatggcattggccttccaggcatggtatgtgcccgaggggtcagtctgatagagcctaggagtgccatcaaagtcgaaacccacgatgagggcagagatgccaaacggcctgcgcccattgctctgcgtataacgctgcttcagactggcgatgtagcgggtgatgtactccacagtgaccgggtcctccacagtcagccggtggctctggcactccacccgggccctgttgatgactatccttgcatcggcggtgagg

SEQ ID NO: 79 - DNA, 426 bp, Homo sapiens
  misc_feature 399: n = A,T,C or G
ctgtgccataagagcattaggtggttttagctcttatctggggtatgaaagcaatttagctcatctcacagaaacaaaagcaggtgctgaatcatgaaaacctcaattatttttagcatgcctcttaatttttctttcccctggtttcttgtcgtctgtgcttgattcttgaacaggtaaccacttgagaggatgccggcgatagatgggccatggaggaagtgtcagcaaacatgaaaaagcaaatccggccataactatatagacagtccacccgaactgttcagccacgtacccgtagataaatccaactattgcagaaaaaagaataattccctgaaacatctgttcagctagcttctggcccttgtaatccatctgcgtgggcagcgagctcanatgctccagcatggctggctgaggagg

SEQ ID NO: 80 - DNA, 38 bp, Homo sapiens
  misc_feature 18: n = A,T,C or G
tttgttgccccaaatggnttttttaccaagcctttttt

SEQ ID NO: 81 - DNA, 459 bp, Homo sapiens
ctgatatctcctggtgctatccccaaactgccactcttaactcttgaagtaaataaataatctttgctggcaggactatgccaaatctccttaagcactctctaatcagacatcaagtcgtcccatttcttagaccttttatacctgtttttctccttctgttattccatttagtttttcaattcatacaaaaccgtatccaggccatcacctatcattctatacgacaaatgtttcttctagcatccccataatatcaccccttaccacacgacctccctccagcttaatctctcccactctaggttcccacgccgcccctaatcccgcttgaagcagccctgagaaacatcgcccattatctctccataccaccccccaaaaattttcgctgccccaacacttcaacactattttgttttatttgtcttattaatataagaaggcaggaatgtcagg

SEQ ID NO: 82 - DNA, 204 bp, Homo sapiens
aaataccgttttttacaccgttctctcggtacttttttaagctaagtcagcattgtcttccagtgttaaaggcatccctcacctctgcattgaacttacgtatccatgccaaggaatggaatttccatcctgagccagttcagttaggtgtcaattgatactattttaattttttatgcaatctgatgagatgagctcagattt

SEQ ID NO: 83 - DNA, 411 bp, Homo sapiens
ccagacgtttggcacaaggatcttcatgtttaattgcctcgtgcatttctccttccgcaattatactaaatattttgggcagattggtattgtttgggccaagaacaattggatgattactttcaatcaggtcacacagataattgaaagtctgaacagcttcttctttatcttcatgtagtggaagccaagacaaccagtgtggaaggacctcttcaacgtttacacagtcaggcttgaacttcatgattttccctactgctgagatgcagttctctgtagcattgacattttctttggtcttagaatccgcagactgaataactcttaccagcaggggaagtgcttctgtacaaaaagggcgataattatctccaccgtactgtgccatgactcccaggccatatgcag

SEQ ID NO: 84 - DNA, 356 bp, Homo sapiens
ctgaaccagatcaaaaaccccattgagaaacatggggccaacatggtccccatcaaggattacgagaacaagaactccaaaatgtctaaaataaggacacacaattctgaagtagaagaggacgacatggacaaacaccagcagaaagcccggtttgccaagcagccggcgtatacgctggtagacagagaagagaagccccccaacggcacgccgacaaaacacccaaactggacaaacaaacaggacaacagagacttggaaagtgcccagagcttaaaccgaatggagtacatcgtatagcagaccgcgggcactgccgccgctaggtagagtctgagggcttgtagttcttt

SEQ ID NO: 85 - DNA, 395 bp, Homo sapiens
  misc_feature 319, 327: n = A,T,C or G
ccgccatcacaccctggactcctgcaggggaggacacacggaggtggacaactgcagatacacttactcggagtggcacagttttactcagccccgtcttggtgaagaatccattagaggacacactctgattaaaaattaaacaatgaaagaaagtgtatctgtgtaatcaagatgaaaatcacaagcatgcccaagactatgtcctgacatataactatgaaggaagaggatcggtggctgggtctgtaggttgttgcagtgaacgacaagaagaagatgggcttgaatttttggataatttggagcccaaatttangacactancagaagcatgcatgaagagatgagtgtgttctaataagtctctgaaagccagtggctttatgactttt

SEQ ID NO: 86 - DNA, 536 bp, Homo sapiens
ctgtaggaactactgtcccagagctgaggcaaggggatttctcaggtcatttggagaacaagtgctttagtagtagtttaaagtagtaactgctactgtatttagtggggtggaattcagaagaaatttgaagaccagatcatgggtggtctgcatgtgaatgaacaggaatgagccggacagcctggctgtcattgctttcttcctccccatttggacccttctctgcccttacatttttgtttctccatctaccaccatccaccagtctatttattaacttagcaagaggacaagtaaagggccctcttggcttgattttgcttctttctttctgtggaggatatactaagtgcgactttgccctatcctatttggaaatccctaacagaattgagttttctattaaggatccaaaaagaaaaacaaaatgctaatgaagccatcagtcaagggtcacatgccaataaacaataaattttccagaagaaatgaaatccaactagacaaataaagtagagcttatgaaatggttc

SEQ ID NO: 87 - DNA, 454 bp, Homo sapiens
ccaattgaaacaaacagttctgagaccgttcttccaccactgattaagagtggggtggcaggtattagggataatattcatttagccttctgagctttctgggcagacttggtgaccttgccagctccagcagccttcttgtccactgctttgatgacacccaccgcaactgtctgtctcatatcacgaacagcaaagcgacccaaaggtggatagtctgagaagctctcaacacacatgggcttgccaggaaccatatcaacaatggcagcatcaccagacttcaagaatttagggccatcttccagctttttaccagaacggcgatcaatcttttccttcagctcagcaaacttgcatgcaatgtgagccgtgtggcaatccaatacaggggcatagccggcgcttatttggcctggatggttcaggataatcacctgagcagtgaagccag

SEQ ID NO: 88 - DNA, 512 bp, Homo sapiens
  misc_feature 475: n = A,T,C or G
ccaacaccttccgtggctttactcagctccagactctgatactgccacaacatgtcaactgtcctggaggaattaatgcctggaatactatcacctcttatatagacaaccaaatctgtcaagggcaaaagaacctttgcaataacactggggacccagaaatgtgtcctgagaatggatcttgtgtacctgatggtccaggtcttttgcagtgtgtttgtgctgatggtttccatggatacaagtgtatgcgccagggctcgttctcactgcttatgttcttcgggattctgggagccaccactctatccgtctccattctgctttgggcgacccagcgccgaaaagccaagacttcatgaactacataggtcttaccattgacctaagatcaatctgaactatctcagcccagtcagggagctctgcttcctagaaaggcatctttcgccagtggattcgcctcaaggttgangccgccattggaagatgaaaaattgcactcccttggt

SEQ ID NO: 89 - DNA, 419 bp, Homo sapiens
  misc_feature 326: n = A,T,C or G
ccaaccttcctgtgcccagcctgcagacaggtggcctctggtggttccaggatctcacggtatccgatcccatctacatattaccactggcagtcactgctacaatgtgggctgttcttgagctaggtgctgagacaggtgtgcaaagttctgaccttcagtggatgagaaatgtcatcagaatgatgcccctgataaccttgcccataaccatgcatttccccacggcagtgtttatgtactggctctcctccaatttgttttccctggtccaagtatcctgtctccggattccagcagtacgcactgtacttaaaatcccccancgtgttgtacatgacctggacaaattacctccacgggaaggcttcctagagagcttcaaaaaaggctggaaaaatgctgaaatgacgcgtcag

SEQ ID NO: 90 - DNA, 364 bp, Homo sapiens
  misc_feature 152, 189, 190, 228, 275, 298, 325, 336: n = A,T,C or G
cctgggtgcgaagcatgttggcttggcccttcacggtcctggagggaggtgaggctggccttggaaggcgtgccctggagaggtcttgggtgaaaacttgaccttgaagaaaccaatcacaaaagcggcgttgggtcatgggctaggcttanaggtgaagcatcaacatggaaccatctcaggaagccnnatcgcctcttccgaggtcctcacttccgggagcctgtncttgcaagatgcaatcatcgttcctgctttttcattgtcattaaatnctgtacaaacccattgtcattanctccaagtgtaaatttgggtcaagganacagaataatnatgggaatctcggagttcgacaccatag

SEQ ID NO: 91 - DNA, 134 bp, Homo sapiens
ccttttactgcgtctatattcctctaacttccttaatgatcaatcaaaaaaagtaacaccctccctttttcctgacagttctttcagctttacagaactgtattataagtttctatgtataactttttaactgt

SEQ ID NO: 92 - DNA, 363 bp, Homo sapiens
  misc_feature 317: n = A,T,C or G
ccaccatggagaacaaggtgatctgcgccctggtcctggtgtccatgctggccctcggcaccctggccgaggcccagacagagacgtgtacagtggccccccgtgaaagacagaattgtggttttcctggtgtcacgccctcccagtgtgcaaataagggctgctgtttcgacgacaccgttcgtggggtcccctggtgcttctatcctaataccatcgacgtccctccagaagaggagtgtgaattttagacacttctgcagggatctgcctgcatcctgacgcggtgccgtccccagcacggtgattagtcccanagctcggctgccacctccaccggacacctcagacacgcttctgcag

SEQ ID NO: 93 - DNA, 97 bp, Homo sapiens
  misc_feature 88: n = A,T,C or G
cctgggtgattgaggatgcaatgagctgtgattgtgccaccacactccagcctgggcaatacagcaagactgtctcaaaaaaaaaaancccaaaaaa

SEQ ID NO: 94 - DNA, 497 bp, Homo sapiens
  misc_feature 244, 429: n = A,T,C or G
ccaaaagtttagcatattctgcagcctcttctttatttttcttggtacgctgcttcttcagagcaatacgccgccgtttgtgctgcaggacacgtggagtaacaagacgctgaatcttgggtgctttggtcctaggtttcttaccttctttatttaagggctttcttacaacatactggcggacatcatcttctttagagagattgaaaagtttgcggattctgctagctcttttggggcccangcggcgaggcactgtagtatcagtcagtccaggaatatccttctctcctttttttacaataaccaagttgagaacgctcagatttgcatccacaatgcaaccacgaactgattttctctttctttctccagttctccttggtctgtaacaggaatgccccttactcagtagcaggcggacacggncatgggtcaagacaccctgcttcatggggaaaccttgtttgtcgttcccaccactgattcggaccaca

SEQ ID NO: 95 - DNA, 459 bp, Homo sapiens
  misc_feature 357, 370: n = A,T,C or G
aaaagacaaaaacaaaacaaaaataccacagctcaagataaagagtcctatacagaaatcacaaaaaggacagaccatctaaggaaaaattaaaaagacgacacaaggacaggctgggcagcctgggtcagggctcctggctggtgacctgctttgagtaggtttcttgcaggtacttcttaaaagctgtggggtttttccagagctcggcagcatgtgtgttcaagggactatcaatgttgggttctcctagaaggctctggatggagagcagaatggtcctgacatcatacagggcagaccacttttccttcaggatgtccaggcatatgttaccctgggtgtccacgttggggngatagcagggcgngaggaacttcactgtgggcgcattgtaagggtagccactggggaactctagcgagagcttatacctcaggtcttcatatactgttccag

SEQ ID NO: 96 - DNA, 230 bp, Homo sapiens
ttcgaaagcatcttgagaggaacagaaaggataaggatgctaaattccgtctgattctaatagagagccggattcaccgtttggctcgatattataagaccgagcgagtcctccctcccaattggaaatatgaatcatctacagcctctgccctggtcgcataaatttgtctgtgtactcaagcaataaaatgattgtttaacgaaaaaaaaaaaaaaaaaaaaaaaaaa

SEQ ID NO: 97 - DNA, 535 bp, Homo sapiens
aaaattattctcttctaaccaatgaagtgtttgtcagtatgccccaaagcttgctcttttgtgctcccttttgaataactttctatccagaaaaagagattatttgggacttgagatttgcagtgataccaacttatagcaatgatgtactttaagggaactacccaactatgttgtgatagaagaaagagaaaccttcactttggcattttttttaatcactgtttatttttctgtttgcggcccaggaagcagtgggaggtggtggcagatatgctttgcatatggattgttatgtttttatttgggcaagtttaatcatggaaaactcaaaaagaaggggggaaatggtcagtttaagccaaaagaaactttctaaacaatgtataggtacacagcaaaattaaacaaatccaacaatttctgaagcttagtgtaattgagtggtggttgttattcaataaaattattcccaaaagtgtttctcctaagagtgcagttcccatgagtcacttcctgaacccattgaccaaag

SEQ ID NO: 98 - DNA, 255 bp, Homo sapiens
  misc_feature 252, 255: n = A,T,C or G
aaaataaaaaaaaatttgcacttattcctcacaaaatcttcacttttggaactatcccaattgaagctacacactgaatttattaatacagcattaagtttctttgtgtaaaaaaatctttgtacacagtaataaaaaaagataaggcaagatgcattaaacagaaaccttctggctcttttcctctgcgtttttacagagccactgatgactatctgcaacaaaagagttaagtttctgattttccgtatnaan

SEQ ID NO: 99 - DNA, 599 bp, Homo sapiens
  misc_feature 162, 183, 315, 318, 324, 326, 357, 522, 571, 599: n = A,T,C or G
aaataaaaagagatccaaatcaagatcctcactaccccctacccctcaactaaccccctttagggccacattttcttcttgctcctaagaaaaaaatttggaattttgaatattctcggttttctgtgcacacctggaattgggcaaatgtgttcagctcanccagcattttctgtagacatnatcaaaagcaggcacttggggattctgggctttgagtacaaaccacggatcttgtgtcagaaacacatgttgagactcctccattccttccagaattttcagagatgaggtagacccacctcaatcatcctnagnatcagntngctaaattgccaggctcaatgacaagctctnctgccatctccaagcccacttttcatagttccgctctgtctttggctgcagcactttaggcactattctaagtcctggagtatatcactcttgcttcagagctaaataaacattaatgaacacacttactcagaacaagtcactggatagctgcccattgcaagntacatactcatgagatgaaagagggaagccattaaaggtcttcagagtngacaatacctagtcaagatgtggacctn

SEQ ID NO: 100 - DNA, 190 bp, Homo sapiens
ccacctccaaaactgcagaaaatattacacgtagtgttgaacacaaaacataaactaagttttaagccacataggtgttctgaaagcatgctcaacaaccacagccactggaggatggtccactggaaaaatatgatttcaggaaccagaagtaaagatgattaccctagtctcaggtgatgtggccttt

SEQ ID NO: 101 - DNA, 356 bp, Homo sapiens
  misc_feature 5: n = A,T,C or G
ccagngtcatatttgggcttaaaatttcaagaagggcacttcaaatggctttgcatttgcatgtttcagcgctagagcgtaggaatagaccctggcgtccactgtgagatgttcttcagctaccagagcatcaagtctctgcagcaggtcattcttgggtaaagaaaatgacttcacaaactctccatcccctggctttggcttcggccttgcgttttcggcatcatctccgttaatggtgactgtcacgatgtgtatagtacagtttgacaagcctgggtccatacagaccgctggagaacattcggcaatgtcccctttgtagccagtttcttcttcaagctcccggagagcag

SEQ ID NO: 102 - DNA, 415 bp, Homo sapiens
cagagaagtggatggacatttcgccatccaggcagaactaagccaggcataaccacagccaagcagattaaccccaggcagaccgataaaaagacctccagataggcagacagacagatggaccaccaacctggacagacagccaaagcttcagagatacagtccacaggtggacaaagggatccccagccagagagagagagaccagccaacagcttgatagaccagtgcagccagagagaccaccaaacagagcccccaaaagacagacatctctgctagctggacagccaggtggaccccctaagttagattactagacagatataaacagatcccctgctgaacagatacacagagttctcagaccccacccccaccctcaggtgggctggctggctgacagaccttctgg

SEQ ID NO: 103 - DNA, 190 bp, Homo sapiens
aggaagagctggcctacctgaagaagaaccatgaggaggaaatcagtacgctgaggggccaagtgggaggccaggtcagtgtggaggtggattccgctccgggcaccgatctcgccaagatcctgagtgacatgcgaagccaatatgaggtcatggccgagcagaaccggaaggatgctgaaccttggtt

SEQ ID NO: 104 - DNA, 507 bp, Homo sapiens
  misc_feature 209: n = A,T,C or G
ccactgcacttcagcctgggcgacagatctagaccccattctaaaaaaaaacaaaaaccccaaacccacacccacgaaagggtaatgttggcaagaagttgggtgcagaggtctactggtgaacatctgtggggaaagggtctaaggctgggaagcgagacgccaggttccgatcctgttgtgtagttaatttctggtgtggtcttgantaaggtaccccacctttatctgtaaccatctagtcaggtgatctctttagccattccagtgcccgggctctattagagctagttctaaggcattcatacttcttgcttagggcgtttctgtctttgatccctcatccccaggtgctagtgtatgagttgttgggaaagggctttcgagggggtgggggccaatggaaggctctgttgggacggcaccaggcgaggtgttgagttggctcggctcaaggttcttcggggtgtgagctggcatgaggacctgttggaagtgggatccagg

SEQ ID NO: 105 - DNA, 553 bp, Homo sapiens
ccatgaaaggcagctcttgccgaatgcgccgttcaattactttggggtacacgaccaatccttcagaaatgttctgcagcgtattcaatatagtatctgcggtaagaaatgcctcggccaaacagatccgtcggttggcactatcatccagtgtgcgttcaaaccactggacagatgctgtctgtagcgggtccatgacaagggtcatcaggtggcgggcaagactgcagcaacgttctgaacgcatgggattccgcttatatggcatcgcacttgagccaatctgctgtttttcaaagggttcctccatctccttgaggtttgccaggaggcgtatgtcggtgcaaatcttgtgcactgatgcccccaagctagccagcacagacagtacttcaatatccacttttcgtgtatatgtctgccctgtgatgatgaaagctctcttaaatcctgccttttctgtcaccatcttgtcaagctgctctaccttatggtcatctccctcaaagagctgcaggaaactggcctgagtgccagtggtaccctttactcc

SEQ ID NO: 106 - DNA, 617 bp, Homo sapiens
  misc_feature 356, 585: n = A,T,C or G
cctttccctgcccagtctggtgcctgccccacgttgtaccggacactggattcctggacccccttctcctttcctttctttccttcaggtcacgcagccctgtactgtatccagcaccacagaaacctcagtgtttttcctctgctggtttggggcacaaggaagccttagggtatggggaaaggctgttattacctagagtttactcccaggccagggggctgccatcttcttcacagacatccctgaaaggaagcccctttggggcagggaggtgaggacttcatctcaacatcggctggtggttggtaggggagctttttcttttctttccttttttttgtttttgtttttgnttttgtttttggtaacatgttaggagttaatgttgcaaagagtagtttacatcttcactttctgaagacacttgaatttaggaccgatgtatctgtgacaagcatgccagaagtggcaggggccatcagggctaaccacttcacacctaccatcgtcccatggggatccaagacctgagataaagcaacagcctgcccagatccctctgttcatcctatcccttccaangttggtccatgccaacataacctctgggcatc

SEQ ID NO: 107 - DNA, 167 bp, Homo sapiens
ccacccacgtcaaacatgtggaagttgactttgtccacctggaacttggtctcaaagattccagaagtcaggacacggcagcgaagcaggtcctgatcgctcggcacatagtcagcctgcttgatcacgtcgatcttgtccaggaagtactgggcacagtcaatcag

SEQ ID NO: 108 - DNA, 280 bp, Homo sapiens
aaaaacatggctgggtggaacatttctgtaccctactggtttgaccagagccttagtaagtacgtgcctgaaactgaaaccatgtgcactttaatggaaggtaagctgaacttctttcttttcaaacctagatgtatcggcaagcagtgtaaacggaggacttggggaaaaaggaccacatagtccatcgaagaagagtccttggaacaagcaactggctattgaaaaggttattttgtaacatttgtctaactttttacttgtttaagctttgcctcag

SEQ ID NO: 109 - DNA, 516 bp, Homo sapiens
  misc_feature 19, 26, 33, 36, 41, 59, 62, 82, 89, 93, 107, 168, 171, 208,224, 237, 238, 257, 260, 372, 384, 428, 432, 502, 516: n = A,T,C or G
ttggccggctttaaaaagntgagaanccagatnctnaatanaagaaaccccaagccaanaangttgatgctggtggcaaggngaaaaanggtnacctcaaagctaanaagcccaagaaggggaagccccattgcagccgcaaccctgtccttgtcagaggaattggcnggngttcccgatctgccatgtattccagaaaggccatgtncaagaggaagtactcngccgctaaatccnnggttgaaaagaaaaagaanganaaggttctcgcaactgttacaaaaccatttggttggtgacaatcaacggcggtacccgggtggttaaacttcgcaaaatgcctagatattatcctactgaagatgtgcctcnaaagctgttganccacggcaaaaaacccttcagtcagcacgtgagaaaactgcganccancattacccccgggaccattctgatcatcctcactggacgccacaggggcaagagggtggttgtcctgaancatacctcagccgn

SEQ ID NO: 110 - DNA, 527 bp, Homo sapiens
gggcacaatgataaacatactggctgttgtggtgacaatgacccaattgatgtgtgtgaaattggaagcaaggtatgtgcaagaggtgaaataattggcgtgaaagttctaggcatattggctatgattgacgaaggggaaaccgactggaaagtcattgccattaatgtggatgatcctgatgcagccaattataatgatatcaatgatgtcaaacggctgaaacctggctacttagaagctactgtggactggtttagaaggtataaggttcctgatggaaaaccagaaaatgagtttgcgtttaatgcagaatttaaagataaggactttgccattgatattattaaaagcactcatgaccattggaaagcattagtgactaagaaaacgaatggaaaaggaatcagttgcatgaatacaactttgtctgagagccccttcaagtgtgatcctgatgctgccagagccattgtggatgctttaccaccaccctgtgaatctgcctgcacagtaccaacagacgt

SEQ ID NO: 111 - DNA, 580 bp, Homo sapiens
aaatactatcacataaagcatggtggagaaaagaaattttgcttcataattagaaaaactcacaataaaacttgccaagaaaaacaaaaacgaaaaagccatttgaaaataaatacagtccatgccaaagtagtataaaatgaagccagaagtcttcaaaaagaaaacattttcctttcaatattttctttttaatgattttctgaaattggtgagactgtcaaattcaggggttgctgagctgttctgatttggttcctttggtatctgttttttcaccactgttgtccttggatttatcttcttccttaacgtctgtttttttgtcctctgtttctttcttatcttcttcaattctagctttctttgctcctttcttatgatcagccacatttcttcgacctccttctccttcatcctcagaatctgagaattcttcatcacaagctatccgcttgtctgatgctcgaatagaaattctcttgtctggatcttctccatcttcatctccactgtcttcatgaacagcatcttctggaatagcttgcatctggacaccaggtgcatgaggtaacatgcg

SEQ ID NO: 112 - DNA, 283 bp, Homo sapiens
aaaagacatttcagcttctttactcagttctgcatatacagtgcatcagtctgttctctttgaccacaattggaatacatttcaagatggtaacagccccatgaagtaccgctttaattccttgctggtaatctaatagaatcagattaagaaaattaacacaattttaccatttgacatactcttcattgaatttagtttgtctaaaatagtctcacaggtaaaaaacataacaacaatgaccaccattgtctttgatacatttattttaattcttaagtgg

SEQ ID NO: 113 - DNA, 575 bp, Homo sapiens
ctggaagcctggaggagtcacctgaattttctggtcatccaactcttcttcctgtggcaccaaagccacaaaataaggagggatgttcctgcggggtgtgtatctgcacaatgctgcaacctccttctccagacacttgatgagcagagcactgaacagggttgagctcccaatcaccagcgactcctctgggtacacgaacagggagggcctcaggtaatggtgtttcttcagcagtaccaacggcttgaaacccatgagcatcaaacctggatcatcaaaccgttttagctcttctgtttcctctttctccagtataatctgacgactcccatagatctgagacctcttggtatcgctaggcagaagcaaaccgcctgtacttgtattaaaggtccgggtcttggttttcactggttcatttgtttcccgatagagctttattggaggaggcttgagagccttctggaccagattataaatgcccacagagatcactatatctttgttgagcttcagctttaacctgctgagtgctcgcttcctggtctccttggcgcgaaccttccgcaaca

SEQ ID NO: 114 - DNA, 314 bp, Homo sapiens
aaatccttgaggggtacagcatcactcggattctgtgtccaatggccttagcaggaagattgcttcggaatttggcacgaaccatgccactgtttccatgggcccgagttacttttccccagatgactctggttttgtttggtttgccgccaggagtgactgtgttgttctttgctttatatacataagcgcatctcttgcccaaatagaattctgtttcatctcgggcgtaaacaccttcaattttaagaagagctgtgtgctccctttggttccggagaccccgcttatagccagcaaaaatggccttggac

SEQ ID NO: 115 - DNA, 304 bp, Homo sapiens
ccttgtcctctcttaggtccagagctcaggtgaatgcagattttcccggccatctgtgctgaagtccctgtggggaggctcctggctggtttcctgtaggtagacagctacacgtcctgcccttcattggcttcttttcatgaagctcctgccatctacaaaacatgtctcccttcttgaatcacatctctgttattgaaactctagaagtcaaccgggcatggtggctatgcctataatcccagcattttgggatgccaaggcgggtggatcacctgaggtcaggagttcaagaccagcctgg

SEQ ID NO: 116 - DNA, 454 bp, Homo sapiens; identical to SEQ ID NO: 87

SEQ ID NO: 117 - DNA, 380 bp, Homo sapiens
ctgtcctgcagcaaacactccaccctccaccttccattttcccccactactgcagcacctccaggcctgggtcccctgcaacctcccatcaaaggatgacccctaaacacagaggagcggggcaggcaggggggcaaggactggagctaccttgcttgttgggggactgggtacagttggcaagctgtgtttccatcagctccctgtcctcctttcttccctcgttattgatctatagacattaggaagggagtgagacggctcctccaccatcctcagccagtgcaacccattccctctgcttctctctctctctctctctctccctccctctccttccctaccctctcaccatctttcttggcctctctgagggtctc

SEQ ID NO: 118 - DNA, 651 bp, Homo sapiens
  misc_feature 492, 573, 639: n = A,T,C or G
gcgagaatgaagactattctcagcaatcagactgtcgacattccagaaaatgtcgacattactctgaagggacgcacagttatcgtgaagggccccagaggaaccctgcggagggacttcaatcacatcaatgtagaactcagccttcttggaaagaaaaaaaagaggctccgggttgacaaatggtggggtaacagaaaggaactggctaccgttcggactatttgtagtcatgtacagaacatgatcaagggtgttacactgggcttccgttacaagatgaggtctgtgtatgctcacttccccatcaacgttgttatccaggagaatgggtctcttgttgaaatccgaaatttcttgggtgaaaaatacatccgcagggttcggatgagaccaggtgttgcttgttcagtatctcaagcccagaaagatgaattaatccttgaaggaaatgacattgagcttgtttcaaattcagcggctttgattcancaagccacaacagttaaaaacaaggatatcaggaaatttttggatggtatctatgtctctgaaaaaggaactgttcagcangctgatgaataagatctaagagttcctggctacagaaagaagatgccagatgacacttaagacctncttgtgatattt

SEQ ID NO: 119 - DNA, 472 bp, Homo sapiens
  misc_feature 466, 467: n = A,T,C or G
ctggagcctgagtccgctgcacggagactctggtgtgggtcttgacgaggtggtcagtgaactcctgatagggagacttggtgaatacagtctccttccagaggtcgggggtcaggtagctgtaggtcttagaaatggcccagttcggtgttggtttttattctgcttatttggttgctgagaaagtaactgtgatcaccaaacataacgatgatgagcagtacgcttgggagtcctcagcagggggatcattcacagtgaggacagacacaggtgaacctatgggtcgtggaacaaaagttatcctacacctgaaagaagaccaaactgagtacttggaggaacgaagaataaaggagattgtgaagaaacattctcagtttattggatatcccattactctttttgtggagaaggaacgtgataaagaagtaagcgatgatgaggctgaagaaaaggaagaccnngaaga

SEQ ID NO: 120 - DNA, 544 bp, Homo sapiens
  misc_feature 544: n = A,T,C or G
cgagggcctgctgcttcctggttaagtatcttttgagattctagaacacatgggagctttttattttcggggaaaaaccgtatttttttcttgtccaattatttctaaagacacactacatagaaagaggccctataaactcaaaaagtcattgggaaacttaaagtctattctactttgcaagaggagaaatgtgttttatgaacgatagatcacatcagaactcctgtggggaggaaaccttataaattaaacacatggcccccttagagaccacaggcgatgtctgtctccatccttccctctccttttctgtcacctttccccctagctggctcctttggacctacccctgtccttgctgacttgtgttgcattgtattccaaacgtgtttacaggttctcttaagcaatgttgtatttgcaggcttttctgaataccaaatctgctttttgtaaagcgtaaaaacatcacaaagtaggtcattccatcaccacccttgtctctctacacattttgcctttggggatctggttggggttn

SEQ ID NO: 121 - DNA, 579 bp, Homo sapiens
  misc_feature 505: n = A,T,C or G
ctgatgctgtttgatgactctgggaagtattgaaggttccaaaatcagcactggaggatttggggaagttatcaaaatgagcaaaattagcatttactgatgcagcacttccacctgtagtttggggctgaaaaggagagtgacttgctgtggggaaacctccaaaattactcgaaccactagactgtccaaatgcatcaaagtttgcaaaatctgcatttgcagaattctgagctgcatgactgttgaaatgtgcaaagttagcaaaattggctgtagctgttgactgaggagctggagcagcaaagatgtctgagccgagatcacttaaaaggtcaaattgcttcttctcctgctgctgcccttgagaacgacctacaactggggactgactaggtgtgcccttatttaagtgcagtgttggtgcagaatcccctaaaagagatttcagtggtttgacctcaggtgtgctgcttgtgctactggcagaggacccttgaaatanatgcatgaactgatgccacgactttggcttgttctggcgggacataccatcttttcttttcatacttttcttga

SEQ ID NO: 122 - DNA, 238 bp, Homo sapiens
ctgccacagagggcccccaccagggaaatgtctagtgtctagtggatccaggccacaggagagagtgccttgtggagcgctgggagcaggacctgaccaccaccaggaccccagaactgtggagtcagtggcagcatgcagcgcccccttgggaaagctttaggcaccagcctgcaacccattcgagcagccacgtaggctgcacccagcaaagccacaggcacggggctacctgagg

SEQ ID NO: 123 - DNA, 377 bp, Homo sapiens
attacgccaacttggtaccgagctcggatccctagtaacggccgccagtgtgctggaattcgcccttggccgcccgggcaggtctgggcggatagcaccgggcatattttggaatggatgaggtctggcaccctgagcagtccagcgaggacttggtcttagttgagcaatttggctaggaggatagtatgcagcacggttctgagtctgtgggatagctgccatgaagtaacctgaaggaggtgctggctggtaggggttgattacagggttgggaacagctcgtacacttgccattctctgcatatactggttagtgaggtgagcctggcgctcttctttgcgctgagctaaagctacatacaatggctttgtgg

SEQ ID NO: 124 - DNA, 461 bp, Homo sapiens
ccagggtggagtgcagtggtgtaatcaaagctcactgcaaccttaacctccctgggctcaggtgatcctcccatcttcagcctgtcaagtagctggaaccacaggcatgtgccaccacacccagctaatttttttttaatgttttagagagacagggtttcaccacattacctaggctagtctcagaactcctggactcaagtgatctgcccatctcggcctctttgtatgtagactgtaccatgttgaatatattatcaatattcaagaaactagctttaactaacttttgctggtcaattccactgtactggctccgaaaattatcctctgggtactccctactatgaaaatggaggtattcttcaaaagatattaagaaattctccctatcaagacttatttatctatccactgatggttgttacatattaaataagcttaactgcccagtttctatt

SEQ ID NO: 125 - DNA, 266 bp, Homo sapiens
ccttctcttttgggtccccaggtggtaaatgtctgtaaacccagctattgcaggggttttgaagtgaagagctttgttatatcctaggtcagcaccacgggctgcccttgttctgaactgggagcacttcccccagtggaggatacagactcaaaagctgttcttggtgtgccttgctaggtgccagggcagcccagggtggcatctttaatgagggcttggcaggagtctcccaggctgagagtggggagtggggagatgaggaa

SEQ ID NO: 126 - DNA, 322 bp, Homo sapiens
ccttttagaagctattaaatgagcaaacattatagataaaccaattttatatctgaagcagcttatagcaccaacacgttggcaggaccagcagaggggtggggtctttggaccaaggcatctgggaacaggaagggctctcagccatcatctaccttatccctgtaagtctattaaatgtaaataatacatactttacaacttctcttagtcggcccttggcagattaaatctttgcaaaattccatatgtgctattgaaaaatgaaataaaacctcagatgtctgaattcttatttcaaatacagttatataattatttt

SEQ ID NO: 127 - DNA, 372 bp, Homo sapiens
accaagttgactctgaggccctggtgggctgcctgcggggcaagagtaaagaggagattcttgcaattaacaagcctttcaagatgatccccggagtggtggatggggtcttcctgcccaggcacccccaggagctgctggcctctgccgactttcagcctgtccctagcattgttggtgtcaacaacaatgaattcggctggctcatccccaaggtcatgaggatctatgatacccagaaggaaatggacagagaggacctgccaagggcgaattctgcagatatccatcacactggcggccgctcgagcatgcatctagagggcccaattcgccctatagtgagtcgtattacaattcactggccgtcgt

SEQ ID NO: 128 - DNA, 575 bp, Homo sapiens
ccaccacacccaattccttgctggtatcatggcagccgccacgtgccaggattaccggctacatcatcaagtatgagaagcctgggtctcctcccagagaagtggtccctcggccccgccctggtgtcacagaggctactattactggcctggaaccgggaaccgaatatacaatttatgtcattgccctgaagaataatcagaagagcgagcccctgattggaaggaaaaagacagttcaaaagacccctttcgtcacccaccctgggtatgacactggaaatggtattcagcttcctggcacttctggtcagcaacccagtgttgggcaacaaatgatctttgaggaacatggttttaggcggaccacaccgcccacaacggccacccccataaggcataggccaagaccatacccgccgaatgtaggacaagaagctctctctcagacaaccatctcatgggccccattccaggacacttctgagtacatcatttcatgtcatcctgttggcactgatgaagaacccttacagttcagggttcctggaacttctaccagtgccactctgaca

SEQ ID NO: 129 - DNA, 261 bp, Homo sapiens
aaactgctctttttatctgcttgtgggaatgtcgtctctttcgtggaagattgggtggtctcatgttgaggctgttgcccagtcccattaactcccttgtccccccacagaaggaagagacattgcccagctaagcatcaggaagctgtgttaaaagcccttctatgggtttggttttgtgatgtttttccctaatgggaaaaacgttatagttgtttcttactgccctgtctgggaagcagggcaaacctccaggttttt

SEQ ID NO: 130 - DNA, 495 bp, Homo sapiens
ctggggtactttcagtttggactgatattcatcacacctcagataaaatgcagagtaatatatagttgcactttataaatggtggttaaatggaaatgttcaagccattttatagttgtgatgcacaatataatttaagtgcttctgtcaaagtattcctccagtacaatttgtatagtttgctgcccttgatgagcaaaagtatttatcttgggcttatctaaatgatcaggatgagatttaatgcccatatcttaccagttcagtaatctccagagccatttcaccctttagagtgagtcacatgcagggagtgtgaatgtcagaggtggtttattatccagtctgccttacccttaatctgttcacagatatttatttactaatgctttttttttcttaagagttatgggataggaaaatgaagtgtttgctcttcatttactaaatgattgtaaacttgagtttttcatcaaaataaaattccattgtttt

SEQ ID NO: 131 - DNA, 214 bp, Homo sapiens
ccaagaggtcagagtcgtccctgaggctgagtcgaacacagacccgtggccctcataaaattaaacataaaagcacaaaaatggcgcaaccagacagcattggcttcagacaggcaggacacggggcccctcgtgtgacctgtgactttccacaaagggcaaggacctggcactgactccggccagtggagaaggctgtgccgcccacccggcc

SEQ ID NO: 132 - DNA, 476 bp, Homo sapiens
cctgggaggagactatggaagaaaggggccctcaagagggagtggccccactgccagaattcccaaaagatcattggccgtccacattcatgctggctggcgctggctgaactggtgccaccgtggcagttttgttttgttttgcttttttgcacccagaggcaaaatgggtggagcactatgcccaggggagcccttcccgaggagtcccaggggtgagcctctgtgcccctaatcatctcctaggaatggagggtagaccgagaaaggctggtatagggggaggtttcccaggtagaagaagaagtgtcagcagaccaggtgagcgtgggtgccagtggggttcttgggagcttcaaggaagcaaggaacgctccctccttcctctcctggtctttctctatgggacctagtaaataattactgcagccacctgaggctggaaaaccactccaggtgggggaggagagagttta

SEQ ID NO: 133 - DNA, 142 bp, Homo sapiens
  misc_feature 23, 73: n = A,T,C or G
aaaattaccttttcatcttgctngattttccttcagctaaattagaaatttgtagtttttcccctaaaaaatncaatggcattctttcttataaattacattctctgattttcttgtcagcctgcttcaaggaaatccatgt

SEQ ID NO: 134 - DNA, 456 bp, Homo sapiens
  misc_feature 1, 4, 18, 25, 69, 93, 98, 115, 134, 246, 352, 365, 369, 438,440: n = A,T,C or G
ngtncaagaaaataattntatctantgattattagtgacttgcaaacaatttactatttctagactaangaaataaattagtgtacaaattantgtancaggttaaaaacacctnagggatttcagaccaaaantgacctatatatatttttaattcatcatatatctgtcctgtttcttcatttttctcaatttccacacgctataaatttaggtcggccaataaagtactaaccgtataaaatnatgtttaatcctataatatcttaattcattttactaatattaaagatgacaaattattacctgtccaatacttatattagctagcaggctcaccagaataaagcanagtattttaattncatnaagacttgttgagtacagaatcaggaaaaagagaaatataattccttttccaaactcccttaaactaananctgcttttgatacttt

SEQ ID NO: 135 - DNA, 495 bp, Homo sapiens
  misc_feature 14, 47, 61, 179, 266, 311, 324, 352, 354, 416, 421, 458,477, 487: n = A,T,C or G
tttttttttgaaanaacatgtattgaggtaccttttattggtataanaacgtaagttccanattaaccatgtcattgtttcattttcaccatggattttttttcacaaactcctttgaaattaaacagacttatatgtaaatgtctttctacattaaaactacttcccaacccacaaanaccccacttactactaatttctggggaatttcgtttactcgttttatctaatattaaaaaatcaacattttgccagcagttaaaaanacaaccttaaagttctcaaattactttccaccaaacccggaaaanaaaaccacccatntccaaaactttaaagcaataaaaatttntnttttccaaaaaagtatttacagactgaaattcaaactctacattgccatcaatgtaattatncaagngcatacaaagccctggaaaagaggaagtatttcattncaaaatatttatgatcaanaaaatattgnttgccttt

SEQ ID NO: 136 - DNA, 384 bp, Homo sapiens
cctgagcccgacttagccagccctggctgttgtattaccaaagcagggtccatgtttgctgccttaaccctgtctcctctctgttactcagagggcctcatctcagacaaggcccagcctgctttttctcagccctgactttctaatgggctttcccccctaggtcagtcttgctggatttgtgcttttcttttgtggtttctctggccctgagaatagcatggggcttgtaaacctttgggctagatccctcctttcattgctgttgtctctgctcttccctctcctggctgtggttatttattattagtggtgtggcactgggagctgctcctaaggaagcagggagcaaatcccacctttaccccaccttcctgggaaagg

SEQ ID NO: 137 - DNA, 113 bp, Homo sapiens
ctgtgcagaaagggctctggagagatgttcatagcagcacacacctgcggctcttcttcggttctggaggctccagggcagccaatattgcttcgtcaaatacattctttagg

SEQ ID NO: 138 - DNA, 408 bp, Homo sapiens
aaagtacttttaagaaaaaaagcagggccttggaagttttggttcttttttcctcccctgttgcaaattctcatggtttgggttgggtggtggagagcgcgtgtcatctgcgggtggcactgcccacggtgggcgggcgggcctctctactcgaaggtgaccacgtttagattctgagacgggaagtggagggtgaataggtcacggcggcctttttttagtttaacttttccttttttgctgtctagtcatcctcgtcggtcttctgcttcttggtatcgacatcgtcatcctaagcagagaaagactgtcaaaggcccctccaaccccaggagccctatccagcccactgcctcagctcctgctggcagagcaagaaccagggacccccagctccacagcccaagg

SEQ ID NO: 139 - DNA, 28 bp, Homo sapiens
  misc_feature 14: n = A,T,C or G
tactgctggatatncctttaacgttgct

SEQ ID NO: 140 - DNA, 386 bp, Homo sapiens
ccaaccagccacgggagttggaattccctaactattgtcagagagagtgcaaagggatttgtctgattgaacaatctgcatttgaagatgacctggacctgcctgcatcccgcatggcagaggtggacatttggaaggtgcgtttgctcatgtttcctcttctctccccagaacctgctaaggctgcctcagacctgactgcctggttcagcctcttcgctgacctcgacccactctcaaatcctgatgctgttgggaaaaccgataaagaacacgaattgctcaatacatgaatctgtacccttcgggagggcactcacatgccgcccccagcagctcccctgggggctagcagaagtataaagtgatcagtatgctgttttaat

SEQ ID NO: 141 - DNA, 399 bp, Homo sapiens
ctggccctccatcaccaatgcggcagtccttgccgtgacatgctgagctctggaaggagcgaaggaggggctgcggtgttcagacaagagcctggacacagtgctgctgacagccaggggaggctctcagcgctgggaggggcgacagataaagcgagacagaccaaggagtaaatgccttgggatctgctctttgggaaggaagaggatgaaagtattaacagcagacgggtctctccaagtctgggtgcctacgcagggggcaggtgggaggggaagggagaggtaagagtggcttcgcttcacctcttgctgctggcaaaggcccaagtgctgtctaacaaggccagcaggttctccaagctgtatctagcccagagcattcatttacaggactct

SEQ ID NO: 142 - DNA, 248 bp, Homo sapiens
ctgcactcagaagaacctgtcgcttcacttgaaaactttctgttatacccaggatagccatatctccaatggtgccttccctcatatctgcaaagaaaaacaaatttactaaaaagcagttttaactaaagtatcaaaacatctctaatgatttataataaaaattaatcctattaataaaattaggacacccaactactttactcagtaggtagataagcctacaaatgagctcaaagaaagccttt

SEQ ID NO: 143 - DNA, 264 bp, Homo sapiens
ctgccttcttcttgacagcttctttagagtctttttgtacttgtacctgggccagcttccaacggttgctgatttcatagattttggttgatggatcgaacttcgctgcctgagagacgggagcacggtgtcccagtgagggcagaaacatcctaaatggattttcaaaggactccatgatgttctgggcttttttctgtgcaactgtcaatggaccctttttactgtcttcagcactaggttcattaaataacgtgatgacag

SEQ ID NO: 144 - DNA, 58 bp, Homo sapiens
  misc_feature 32, 44: n = A,T,C or G
tactagagtctcaatatcttgctggttaccancatttcctacangagaaatgaatgaa

SEQ ID NO: 145 - DNA, 569 bp, Homo sapiens
ccagagcttcatccagagctcactggaaggtggcttggcaggaagagggaatcttcctacagccctcctccaagggggacagaggctgggggcagagaaggaggcatttaagctttgctagcctcctgctgcctctgaggctgtaggacacgtcattcaaacctaccatcaaagtaggcttctgatttcaacttggatctcacggtagcccagtgacaccgcagcagccatgatgggatgtaggcaggagagcggtggcctggaaaccgcttctagacaatcctgtattatttagatctacatagagatacacgaaaaccctttataccaaataagagtaaataattataccaatataaacagggccgttgaccctttcattttattaaaatggcacataattattaaaacagcatactgatcactttatacttctgctagcccccaggggagctgctgggggcggcatgtgagtgccctcccgaagggtacagattcatgcattgagcaattcgtgttctttatcgattttcccaacagcatcaggatttgagagtgggtcgaggtca

SEQ ID NO: 146 - DNA, 546 bp, Homo sapiens
  misc_feature 395: n = A,T,C or G
ccacttccatgccctctccagaccaggagacacctgctgctgacctcgtggaaaacttagattttgacattctgatgcttcggaagtggtggctcctcctccctcacccctccgccacctgtgggcctcctctctgcatctcaagagaacaaccagatctttggactcctggggtgtgtgccatgcaatttagacgaagtgctttgaaaatatgccattcagtctctgactaggaaaataagtctgacctgataggtctgatgtcatcagctcttcaacatgagacaaaagaggggattttatgttttgagtcattagaatgatataataattttctgaattgacatctggatgttgaaattaggatggtgcaaaaggggtccagggcctcaggntgggcgcagcagccagctcccaatgacgcagaagctgcttcaaaaccccctcaacaaagaggggcacatgcaagtcaccaaagtgggaagccttcaccaaggccacacccaaagtctactgattgtctgtctaaagttcgttgattcctgg

SEQ ID NO: 147 - DNA, 653 bp, Homo sapiens
  misc_feature 45, 50, 72: n = A,T,C or G
atccctagtaacggccgccagtgtgctggaattcgcccttagcgngggcncgggcgaggtccttcattttanctaagtttagaatttatattacgcaactatgatttgagtggttattcattgagtaattttccactataaagaattttattgaacatttattaaaaaataatgtaatgcatggtcaaaaaatatgtaattcatggtctggacactgacgttgtttagggatttagtcatcaaggacagccctctgttgtttctaatgccgtactaatcaagactgtatggacacttgcatcttaagtactaaggaattactagtgattgttttattttatccatgtactcttttagtatttaataattaaatacctattcttagtgtttgacactccatatttcttttttttggaaatgaaacaaatatgcagtccaaaattcaggaactactagagtgaaatgatattaagtggaaaccagagataaatgctgttaatttaacaagtagattcttctccaaagaatgatgagtgattcttgggaagataaatgttaatgttcccaatagtcaagcttgtcttgcagtagtgaaaagcttagatgagtacggatacctcatttgaaactcagcctaggtaaggaagtgaaaa

SEQ ID NO: 148 - DNA, 219 bp, Homo sapiens
ccaacatggtgaaaccccatctctactaaaaatacaaaaaaaatattagccaggcatggtggtgcatgcctgtaatcccagctacttgggaggctgaggtaggagaattgcttgaacctggaaggcggaggttgtagtgagctgagattgtgccattgcactccaacctgggcaacaagagtgaaactccatctcaaaacaaaaacaaaactagacagc

SEQ ID NO: 149 - DNA, 547 bp, Homo sapiens
  misc_feature 304, 374: n = A,T,C or G
gctaggtaggggcaggtgggtgatctctaagctgcaaaaactgtgctgtccttgtgaggtcactgcctggacctggtgccctggctgccttcctgtgcccagaaaggaaggggctattgcctcctcccagccacgttccctttcctcctctccctcctgtggattctcccatcagccatctggttctcctcttaaggccagttgaagatggtcccttacagcttcccaagttaggttagtgatgtgaaatgctcctgtccctggccctacctccttccctgtccccacccctgcataaggcagntgttggttttcttccccaattcttttccaagtaggttttgtttaccctactccccaaatccctgagccanaagtggggtgcttatactcccaaaccttgagtgtccagccttcccctgttgtttttagtctcttgtgctgtgcctagtggcacctgggctggggaggacactgccccgtctaggtttttataaatgtcttactcaagttcaaacctccaccctgtgaatcaactgtgtctctt

SEQ ID NO: 150 - DNA, 281 bp, Homo sapiens
  misc_feature 279: n = A,T,C or G
ctgaaccctcgtggagccattcatacaggtccctagttaaggaacaagtgattatgctacctttgcacggttagggtaccgcggccgttaaacatgtgtcactgggcaggcggtgcctctaatactggtgatgctagaggtgatgtttttggtaaacaggcggggtaagatttgccgagttccttttactttttttaacctttccttatgagcatgcctgtgttgggttgacagtgagggtaataatgacttgttggttgattgtagatattgggctgnta

SEQ ID NO: 151 - DNA, 508 bp, Homo sapiens
  misc_feature 498: n = A,T,C or G
ccaggctggttttgatctcctgacctcaagcgatccactgtcctcggcctcccaaagtgttgagattacaggtgtgagccaccatgctcgctgagagcagatatttgaaatgtcactttgagttctgagaaaaagtaaaaagccagaagacatactagatatataaatatattactgcttaaaaagatttcctaaaaagaaatgtatcaagtgtatgaatcaaagtctgaaagaaagatgaagagccaccagacttctaggtaggtttacatccatcatgttcctcttgactgcctttgtttgtcgtttagttttttgctccactcaagcctgttagaatcaccatggaatacagctccagtgggaaggccactggagaagctgatgtgcactttgagacccatgaggatgctgttgcagcgatgctcaaggatcggtcccacgttcatcataggtatattgaactgttcctgaattcatgtccaaaaggaaaataanactctagggg

SEQ ID NO: 152 - DNA, 365 bp, Homo sapiens
  misc_feature 365: n = A,T,C or G
cctgcgcctcctgccttgccgcctgcaaagcaaagaaactgccttttattttttaaccttaaaaagtagccagatagtaacaagactggctggctgatgagcaaagcctttgctctcacgcagaggaaggcttggatgtacaatgaaactgcctggaactaaaagcagtgaagcaagggaggcaatcacactgaagcgggtcttcctccaggaacggggtcccacaggcgtgttgttttaaataacctgatgctgtgtgcatgatgctggtgcttgaccatgaaaggaaagtctcatccttaaaatgtgttgtacttcacaatcctggactgttgcttcaagtaaacaatatccacatttcgaan

SEQ ID NO: 153 - DNA, 203 bp, Homo sapiens
  misc_feature 196, 200, 201: n = A,T,C or G
aaaggaaaagttgattatgtatgtggggtgccaggaccactgccttgaaagcaagtgtgatttttatttttaatattattttatttgtgtctgtgtacatattcatgtataaattttatgaaacccaagcatagtgcttattttttaataaaacaactgacttaacaccaaaaaaaaaaaaaaaaaaaaaaaaagntttnncc

SEQ ID NO: 154 - DNA, 646 bp, Homo sapiens
aaaattttgacaatctgctgggtgctgagggaggtacacagggagcagatagcctctgcgtcctcctgggttttcttctttaattgcaggagctgggctgcttggatcagaggttccatggtctgaactgctccactctggtgaaggtttcttccccgaagccactcctcaagctgacttatattgtacctgagttgcatgcctgtgctccaagagcagacgtccttccgcaagagcaggttgttaagagtcactgcgttgatcatgtagaagagctgtttgaatacctgcaggatgatctcagggtccaagccctggtcacacatgactgtatgaaaggcattcatctggcggatgatagcttccaggcagtatgagttatccccatctgccatgctggaggagcgcttccggtagccggtgggcttcacaccagatagaccctgaatgctctcattttccaacatggcagaaactatcatcggctgtaacacgccctcggcaattttaatgagctgctggtagatctgaatggaaaggtcactcagcacctgacggacctgcccgggcggccaagggcgaattctgcagatatccatcacactggcggccgctcgagcatgcatctagagggcccaattcgccc

SEQ ID NO: 155 - DNA, 336 bp, Homo sapiens
ccatggtggcgcacgcctgtaatctcagctactcaggaggctgaggcaggagaatctcttgaacctgggaggaggaggttgcagtgagccaagatggtgccactgcactccagccttggcaacaagagtgagactctaccttaaaaaaaataaaaaaataaaaaaagtcaaaattagctgggtgtggtggtgcgcccgtagtctcggcttcttgggaggctgaggcaggagcattgtttgaacctgggaggcggaggttgcagtgagctgagactgcaccattgtagtccagcctgcatgacagagtgagactctgtctcaaaaaaaaaaaaaaaa

SEQ ID NO: 156 - DNA, 433 bp, Homo sapiens
ctgcctttgatcaagattcgggtgcaagtggagcaggagccatatacctggagggaatgtgctttgtcacaccaaagaggatttttttttcttcaaacttgtatgttgcctaggtttcaaattctttgccgcaaggctgatctgctttcattaactggaattctgtaggagatactggtgacctaagctaagttgcactcagcatactcagtgtcaagctaatgaggttctattataaaggttctacttttaatctgagggaaaacatgttcagggcttctagaacactaaaaaatttggcttaaaccagtgttcagtctggtgccaaacttcgaatggaatacaaattcacataatctgaactttgttcacaggttatcctaatagagtaattcttcactttgctctattgaactgtcttaaggatttgttt

SEQ ID NO: 157 - DNA, 418 bp, Homo sapiens
aaatcaataagtaatctaggactagcattatgtttgctagacctggcatttgctcggtacataaggttcaaagtttcctttcctttttttatttattttatattttgcaatgttttttttccataatatttaagtttttcgatgtttagatatttttcttcggtgaagcacaagtttcttttcatggtccctgatcaattttaaacagttggaacaccggtggcactgttaactgctttctgggcagcctctttagcttggtgggcttgtagtacagctacagcttcatcaaccttagaacggagtgactctggagactcgagcatatgaagaagttctgaattatcaatctccaacaacatgccagtgattttaccagcaagagtagggtgcatggcttgaataagaggaaacagcc

SEQ ID NO: 158 - DNA, 389 bp, Homo sapiens
aaatttattttttagtttttcttttttgtcaacaaatgattgatgaaataatgcaacacccttaaattccagaaaatggcatggtttttccaacctcctgtggatatggtgcatgatcaatctattatataggattaatacaagttcatgctttttgtgttatggtgaaacaacattaaagaatccaatttagattggttgaagcacaagtataataatccttgaatgtgatcaaacctatttaagacaccagtttgctttttctctgaaccagagaaatgaaagtcagtttaagaggctgatagatcttggccctgttaaggcatccacttcacagttctgaaggctgagtcagccccactccacagttaggccaagaattagatttt

SEQ ID NO: 159 - DNA, 155 bp, Homo sapiens
ctgagctgaccttactctgaggactaactcttttgctggaagcggtttctgatttacagctcttggtttctcccagacatgttggtgggagagatgttggtttttaaggggttgttagatggagtaaattttctttttttttttttttttttttt

SEQ ID NO: 160 - DNA, 555 bp, Homo sapiens
aaaagtcattcaagagtctcattatttttgtttttatttaaccctttcttcaatacaaaaagccaacaaaccaagactaagggggtgaccatgcaattccattttgtgtctgtgaacataggtgtgcttcccaaatacattaacaagctcttacttccccctaacccctatgaactcttgataacaccaagagtagcaccttcagaatatattgaataggcattaaatgcaaaaatatatatgtagccagacagtttatgagaatgaccctgtcaagcttcattattacgtggcaaaatccctctggcccacacagatctgtaattcactaggctcgtgtttgctacaaatagtgctaataaagttaaattgcacgtgcaatacggaacactgtcaatggactgcaccttgtgaaggaaaaacatgcttaagggggtgtaatgaaaatgatgtagacattttaagcattttctacacagcgagaaaacttcgtaagaacatgttacgtgtgcaacaggtaaacagaaatcctttcataaagcaccagcagtgttt

SEQ ID NO: 161 - DNA, 311 bp, Homo sapiens
cctagatggcaaaacacatgggctttgtgactccactactgacttccaggctaaggaaggactgacttagtgagctgttccaagaccactgagctcatggttccctgtggctgggacctccatcatgaccggggcttgaagagggtactctgttcccgctgccacatttggaacagtatgacggctgcagcagaggccaaaaactaagtgatcagccccagagagtcgatgggggacactgacaaaccaatcacaaagttggtgccattagctcttagggaggagaggtggggcctgggcaaggacagcag

SEQ ID NO: 162 - DNA, 320 bp, Homo sapiens
ctgtgatccagcaccgacccagccggcagtatgccacgcttgacgtctacaacccttttgagacccgggagccaccaccagcctatgagcctccagcccctgccccattgcctccaccctcagctccctccttgcagccctcgagaaagctcagccccacagaacctaagaactatggctcatacagcactcaggcctactatgggtgttaaattttttactctctctacaaggttttttcctagtgtccaaagagctgttcctctttggactaacagttaaatttacaaggggatttagagggttctgtgggcaaattt

SEQ ID NO: 163 - DNA, 643 bp, Homo sapiens
aaaacttctgggttctgctggtccagacagtctttcagaattagaataaaatctgtcttccctttgtggaggaagagttgaatcaggatatgattgccctggtggaggaaacatcatcctacggtcctgttccaccggagatgacagggacccagtgtcagaaggagccctgtgaggatcgattaacctgtcatagcttggttctcctctttcattggtaatctgatggtccaggggattccctgggctgcttgggcctcttcctcctccccctggaagcacaggtgagagtctgagtggatcctccaacaaagtttgaggagagggaaaagttctcgtttcagatgaaggccgacccaatggtgagggactacatggggaatgctctctgccaaatgctgtatttgaaacatcgagtgcattaggatctttttctaaaagttcaaatttcaactctgtttcagttaatttttgtttgttgtgagcattttctttccttaaatcactgaggtttctttcagcagtccgagctgccaaccaattatcatgtcctcttttctcgtaggaaataacctgcttttgataaaaatgaacagttctctccaattcttcttcaagatctttggctagctttctataggtc

SEQ ID NO: 164 - DNA, 636 bp, Homo sapiens
aagattatgatcgcctgaggcccctctcctacccagataccgatgttatactgatgtgtttttccatcgacagccctgatagtttagaaaacatcccagaaaagtggaccccagaagtcaagcatttctgtcccaacgtgcccatcatcctggttgggaataagaaggatcttcggaatgatgagcacacaaggcgggagctagccaagatgaagcaggagccggtgaaacctgaagaaggcagagatatggcaaacaggattggcgcttttgggtacatggagtgttcagcaaagaccaaagatggagtgagagaggtttttgaaatggctacgagagctgctctgcaagctagacgtgggaagaaaaaatctgggtgccttgtcttgtgaaaccttgctgcaagcacagcccttatgcggttaattttgaagtgctgtttattaatcttagtgtatgattactggcctttttcatttatctataatttacctaagattacaaatcagaagtcatcttgctaccagtatttagaagccaactatgattattaacgatgtccaacccgtctggcccaccagggtccttttgacactgctctaacagccctcctctgcactcccacctgacacacca

SEQ ID NO: 165 - DNA, 519 bp, Homo sapiens
ctgtagacttgacctcaaagattccatcctcaatagtgaggattgacacatcaaaagtgccacctcccaggtcaaagatgagcacgtttctttctgctccaacctttttgtctaagccgtaagcaatagcagcagcagttggctcattaataattctaagtacattgagaccagcaatagttccagcatctttggtagcctgacgctgagagtcattaaagtaagctggcactgtgaccacagcattggtaacagtcttcccaaggtaggcttctgcaatttccttcatctttgtcagaaccatagaagacacctcctctggatagaagcttttggtctctcccttgtattctacttggaccttgggcctgccagcatcattcaccaccataaagggccaatgtttcatatcagactggacaacagcatcatcaaatctgcgtccaatcagacgtttggcatcaaaaactgtgttggtggggttcattgcaacttgattctttgcggcatcacccgatc

SEQ ID NO: 166 - DNA, 266 bp, Homo sapiens
aaagtgaatgtgatgttggagagagtgggaaggaaaagtaatggcaagtatgcttgctcattaccaggcactgtgctaagctctgtgaatacacagataagtaaaatccacgctgtttctcaaagaactcacaatctgtttaagaagcagatgtctatacaataattttataactattattcaatgtgattagtactcacatagctctatatagagtgttatagaagaataaattagagaatatctcatttttcctccagtggttt

SEQ ID NO: 167 - DNA, 266 bp, Homo sapiens
aaaatctcttcttcctcaggagtcagcttggctcccttcttgcggcccaggggcagcgcatagtgggactcgtaccactgtcggtacggtgtgctgtcgatgagcacgatgcaattcttcaccagggtcttggtacgaaccagctcgttattagatgcattgtagacaacatcgatgatccttgttttacgagtacaacactctgagccccaggagaaattccccacgtccaacctcagggcacggtatttcttgttacctccccg

SEQ ID NO: 168 - DNA, 567 bp, Homo sapiens
  misc_feature 13, 515, 516, 517, 565: n = A,T,C or G
ctgacttcttttnaagttcccacattaggacattgatcagatgtgaatttttaattacaatcggcacttcttcaaacatgtactcaaaggtgatatttgcttttttcaatgcttcaggggaaaaatccttttctttacaaacttccatcagtttaggagtcagtctgtatgcctttagtgagagagatccttgggcagtttttatgggatcataaatgagaacgacagattcttcaatggcatgctggtaactaaactgagagtccaggagtgcccgggtaacgaatgagccatagtatgtggactgataccagcccacgtgaagatgatcaatgtttacatggcgaaggctccgcatcatttccatctgatattggacttcatcaaagtcagcatcatcctctgtgtgctgagggaaaggaaagcagttggtaatttcaagccgatcttctacaaccagacccaaaagcactccttgaacaacttcagttccttgtccttcttcttgataatgnnngattatctttaataccacaaggccatctatctgcacttgcttcacggntg

SEQ ID NO: 169 - DNA, 272 bp, Homo sapiens
ctgttgcatgccaagttttttgtgtgtgtgaaacacttcaaaactgatttaaaagatgtaaatttaaagagaatgcaattcaaatcatggagaatcttttctaaagaaaatttcaatctgcttttttgatctgggctcacttaaatagtgtgatcgatctatcccttagctgaacaaattatacaaagcagcatttagacttatattcactctcaagtatcaagaggttttcagccttttcttactaactgagagattcttttttggttttt

SEQ ID NO: 170 - DNA, 345 bp, Homo sapiens
ccaggcattctctccctgccctctctggcctctggggtcatactcacttctttagccagccccatcccctccaccccacacctgagttcttgcctcctccttttggggacacccaaaacactgcttgtgagaaggaagatggaaggtaagttctgtcgttctttccccaatccccaggaatggacaagaagccaacttagaaagaagggtctcacgtggctggcctggctcctccgtagacccctgttcttttcaacctctgcccacccgtgcatgtcatcacaaacatttgctcttaagttacaagagaccacatccacccagggattagggttcaagtagcag

SEQ ID NO: 171 - DNA, 156 bp, Homo sapiens
  misc_feature 152: n = A,T,C or G
aaacactgcttttagtatgatgtcaacaccagctatgcagaaagggctctggagagatgttcatagcagcacacacctgcggctcttcttcgatcctggaggctccagggcagccaatattgtatcgtcaaatacattcttttttttttttntttt

SEQ ID NO: 172 - DNA, 114 bp, Homo sapiens
caaaagccctgcatttaataagtgggagatgtggtcacagtggataaaaggagcacacataaaactttagagaggtgatttcactagagggagttttttttttttttttttttg

SEQ ID NO: 173 - DNA, 324 bp, Homo sapiens
aaaatcactttggtggtgattccaaattggtaccaagcaaactttctggatgcccaacatgattttcagtaaccaccctttagagtatttgtttactaagttcaccacattttgaacatggtagttttagactgcaataatatttagacttacattattacttactgctaagtaaaatctaaatcctgcaaatgcacagaattcaagctgaaatataatgatttatgtttagctcacattgaagtattggttggttacttatgtattaatgcagtgtgcattcacatttaatcaggtttagtctgtttctattttaataatttt

SEQ ID NO: 174 - DNA, 364 bp, Homo sapiens
  misc_feature 239, 262, 360, 361: n = A,T,C or G
cagacacacattctgttgacaagggaaaaccttcaaagcatgtttctttccctcaccacaacagaacatgcagtactaaagcaatatatttgtgattccccatgtaattcttcaatgttaaacagtgcagtcctctttcgaaagctaagatgaccatgcgccctttcctctgtacatatacccttaagaacgccccctccacacactgccccccagtatatgccgcattgtactgctgngttatatgctatgtacatgtcanaaaccattagcattgcatgcaggtttcatattctttctaagatggaaagtaataaaatatatttgaaatgcaaaaaaaaaaaaaaaaaaaaaaaaaannttt

SEQ ID NO: 175 - DNA, 532 bp, Homo sapiens
ccttcttatttagattccttttgatgtccttccattttcagatatacagttgcttttttcctctgggttttgggaagggcacctctcacatgacgatcttatggcctgcttctggggaaaaggatggggaaatgtcagagagtccttgcatatatcatctctcaaaactcttaatcttaaatattcagtatgtcaaggtgccatattttggggtagcatgtcctgagctccatcaacattaatgtaaaaatatttagcctaatgcctggcacatatcaagagcttaagaaatgctgactctaaaattatgacatctaggaagatgtggggcagaattgtaaacttacctgctaaattacctatgagctgcccaccattcgttaattatggcaataataatgggtttatcatgctgtatcctcactcttgcaagcagtgttccttgtgcttagcagtaaatgttgcctaatttggggcatgctggtgtgtctgcagactgttcttgtatgtggaaaggtaactggcctgcttg

SEQ ID NO: 176 - DNA, 524 bp, Homo sapiens
aaacctaaattttttaattaaatgcctgttcaacaaagctaattggaacaaacacatttatgtaaatttacattctagaatgccagggtaaacaaggagacgttattcaaagatgaataagaaagttctattctttttcatcatttgtgtgatcaggttgcaaaggacatgcttttctctttgcttttcctaagccactgcttcctgcctcttcaggaatctgattctctttttcagaatctttaggggacaacctaaagaattctccaattcctttttgccacttgggagttgggcgcacgcaaacggggttccctcctgcatatttattttcagctttcctcgatgaaactgatgtcgaattagtggcagaggtggaagaaccaagcacctttctgggggctcgagcagccaccacttttctgtaagtgcctggaacactgtctgctttagtccgcaccatgttcaaacaagaagagaggagaggagagaacgaactgacttcccagccgagggtgtttcac

SEQ ID NO: 177 - DNA, 357 bp, Homo sapiens
cgaagatatgcccatgtggtgttgaggaaagcagacattgacctcaccaagagggcgggagaactcactgaggatgaggtggaacgtgtgatcaccattatgcagaatccacgccagtacaagatcccagactggttcttgaacagacagaaggatgtaaaggatggaaaatacagccaggtcctagccaatggtctggacaacaagctccgtgaagacctggagcgactgaagaagattcgggcccatagagggctgcgtcacttctggggccttcgtgtccgaggccagcacaccaagaccactggccgccgtggccgcaccgtgggtgtgtccaagaagaaataagtctgtagg

SEQ ID NO: 178 - DNA, 420 bp, Homo sapiens
aaatgtcttgtttcccagatttcaggaaactttttttcttttaagctatccacagcttacagcaatttgataaaatatacttttgtgaacaaaaattgagacatttacattttctccctatgtggtcgctccagacttgggaaactattcatgaatatttatattgtatggtaatatagttattgcacaagttcaataaaaatctgctctttgtataacagaatacatttgaaaacattggttatattaccaagactttgactagaatgtcgtatttgaggatataaacccataggtaataaacccacaggtactacaaacaaagtctgaagtcagccttggtttggcttcctagtgtcaattaaacttctaaaagtttaatttgagattccttataaaaacttccagcaaagcaacttt

SEQ ID NO: 179 - DNA, 366 bp, Homo sapiens
cctaaaagcagccaccaattaagaaagcgttcaagctcaacacccactacctaaaaaatcccaaacatataactgaactcctcacacccaattggaccaatctatcaccctatagaagaactaatgttagtataagtaacatgaaaacattctcctccgcataagcctgcgtcagattaaaacactgaactgacaattaacagcccaatatctacaatcaaccaacaagtcattattaccctcactgtcaacccaacacaggcatgctcataaggaaaggttaaaaaaagtaaaaggaactcggcaaatcttaccccgcctgtttaccaaaaacatcacctctagcatcaccagtattagaggcac

SEQ ID NO: 180 - DNA, 187 bp, Homo sapiens
  misc_feature 37, 177, 181, 183, 187: n = A,T,C or G
ccagggtaaataggcagtcaacattttgattcataanagaacaaatgacgagaatatatcagtatcaatgtcagagagtgcaagacttagtgttctatacataaaacatatgaaacagacctataaagatggaatgtacaaaatctaaaaagaaaacaaagcaaaaaaaaaaccccnttcntnttcn

SEQ ID NO: 181 - DNA, 226 bp, Homo sapiens
ctgctagttgtgcttgctgggataaatcttcgatcttggcttccccaaaaactatgtaagtatctgaagcagggctcttgtagacatctggttttgtgatgacaaagaggatattcttagatttccggatagtgactctagtaactcctgtaacctgccgaagacccagtttggacatagccttccgtgccttcttttcactccgactctgttttgctttactgac

SEQ ID NO: 182 - DNA, 314 bp, Homo sapiens
  misc_feature 314: n = A,T,C or G
ctgtattgccgcagttctagcttcaccttcacgatgtttcccttggtcaaaagcgcactaaatcgtctccaagttcgaagcattcagcaaacaatggcaaggcagagccaccagaaacgtacacctgattttcatgacaaatacggtaatgctgtattagctagtggagccactttctgtattgttacatggacatatgtagcaacacaagtcggaatagaatggaacctgtcccctgttggcagagttaccccaaaggaatggaggaatcagtaatcatcccaggtacaagcttttttttttttttttttttn

SEQ ID NO: 183 - DNA, 146 bp, Homo sapiens
aaaaataaatagtaccacttttctaagactgtacagtttacaaataaggtttttttctttgttgttttcctcttctattaagttttagtgaaaagcctaattacagaaaattgtgcagatactagtgaagatactagtataagttt

SEQ ID NO: 184 - DNA, 361 bp, Homo sapiens
cctaagtcattaaaaaattctccctttgtaacctcagtgctggggactgaggcgagccccctcaggtcgctggagtgcaccagtcttggggaagaggtgcaggagaagctgtgttttttatctccacacgcagtatgaagataaaattacatagtattacctagacatagacagtattacctaggtagatgcactgctcacctgcacccttcccagctctcatttttgttaggtgatttgggatagggatagtgttttggggtatggggggagtgtttctgacctgctttgcagacgtgcctccgcacctcagcagtttggggtgtggccccagggcggttcttggatgtaaaagatgtgg

SEQ ID NO: 185 - DNA, 462 bp, Homo sapiens
aaaatactacatgacattctgtctattcaatcacctggtggtcatctttcttgtactaattaactgttgatgagcattttggatattctaggagaaagcctataatttcacatagtttctctttttcatgtaactgtaacctaaatgtattacttctgataaaactatatatcaaatgtcactgcaaattagttttatatctgtcatgtgagatttgtcttacttatttttcttttggttgccatggaagttatggccctgaaaatcgtctccctccccttctcttgctgtacagcatgcgttctctttttgtggttgctggctgggtactgtatttaatgaagtagagaatagcacttgcaaaaatacagtcttggtacctagagactgtcatgcagatagtataatttggtatatgtgctaatgcattgagtagaggattattttaacacactattttgc

SEQ ID NO: 186 - DNA, 178 bp, Homo sapiens
aaatgcattcttcacaagtaattcagcatatatttttatatcatgtttacttatgcttaagaattaaagcaagtatatttattactctgatggaaatgtgggaaatctctcattcatgcaatatacagggataatattcaagcgaagggaaaattcccgctttttatttttgtaaatg

SEQ ID NO: 187 - DNA, 269 bp, Homo sapiens
ctggaggccatcctcctggactaccaggggcggcaggagatcttcctgcagcgccatggacccctatctgtccacatggcctgcctctccttcttcttcctggctgcctgcagtgctgccaccgcagcccttctgaggcacaaagtcaaggccagactgaccaagaaagattcctgaggctggcaagtggggcaacgtgtggaggaagcccctcataatttggagaaaacttgatacaatagaagctgacttttaaggcattggctttt

SEQ ID NO: 188 - DNA, 564 bp, Homo sapiens
aaaatatttataaatatgccttaaagaaatacaaatgataacaattacataccgtatttacttgcttaatttcctctgtatttgtgtagatactttgacatggaatatatggtggggagacccgtagtgttaccgccccagtgggagggggccctggggaccctggtaatgctttagtcaaagggatatctctcttgtatcagaggctgtgtcttttagtaacaggagtcctcgtcagaattgcgtgtctgttgtctctaaaagaatgggtgaaccaatcggcctttgtgaatttattcagtgccttctctgtaccaagcactgggtaaggcacttttgtggagcattagacagtaaccctcaaggagctagagaaccggatgggagacatgagcggtaattaactcacttgttccccagagtttctatttgttttgattttctttttctgtgacttattttcctattttctttcctccatgtaattttcactatggcccaactaatataaacacctggaaattacaaggaaaaaaaattcttcctctaataactttccaaatc

SEQ ID NO: 189 - DNA, 365 bp, Homo sapiens
aaaaattcctagataaatttcattcattaattttctattttattctctatacccttctttgttttgtctgtcttcttttctttccacaaattcccaaggacaatccctaaaaaaactattagtcccagtgttcggttggagataaatttattccaacaatcctcaggtctgtggatgtctagagtgtaaatctggtgagtcagatgggctcctacagcacccagggcagcgtagtagggagcagtctgtccactgttcacacccactaggctcagtgcccccagcattgcaacactgaagccactgagccacggcttggtattttctccgaaccgcagagccgttgacttaagaccaatcaaaac

SEQ ID NO: 190 - DNA, 429 bp, Homo sapiens
ctggttttgccatgatgatctgatccactctaagtacagtgactgcagcattagtagcgagtttgatagcccaatattttcccaggtaagtatctagaataccagcttccagcatgtcctttacagcagggacttcagcctcaatatctaatccaacgtttttatttccttcttgatgtactgcataaagtttagagattacttcattggccttaactccagagttttctgccagtgcgcggggaatagcttcaaatgcctcagcaaacttcttaatagcatactgttcaagtccaggacatgtctctccatatgatgtgatctgtttggctaattcaatttctgttgctccacctccgggtacaagacgtttatcccttgtaagaactttgaaagtattaacaccatcgctactgccctttctatgtc

SEQ ID NO: 191 - DNA, 460 bp, Homo sapiens
aaaaagctacaatcacatcatgttgtaactacgtaaaaaacagagctgtaaatggaactgcttggctttgaccatacacatttctgcccagcccttacagaatctgcacaaagaaatatctccctttgctccagttaattgttcttgtatgtaagttgctttctattccagtatatccagagtggtgaaataacaaggccagccacgtagccaaaggtcgctccaagcgtacaggagatgggccatacctgaggagagaatgtatgagatcaaaaaagaacaaatgttttattattacttgagcacaagtgtaacctaagtatttctatattaaagcttaatgtgctttcttaaagaatgccaaaagtgtaataaggtcataactgcatttatcatgaacactaaaaatgtacacattttagttaatgtgcattaaactgtaacaagggcttctggcaat

SEQ ID NO: 192 - DNA, 291 bp, Homo sapiens
ccattgtgttgcctctgttactgtttgtattgaataaaaacatcttcatgtgggctggggtagaaactggtgtctgctctggtgtgatctgaaaaggcgtcttcactgctttatctcatgatgcttgcttgtaaaacttgattttagtttttcatttctcaaataggaatactacctttgaattcaataaaattcactgcaggataaaaaaaaaaaaaaaaaaaaaaaaaaaaaaaaaaaaaaaaaaaaaaaaaaaaaaaaaaaaaaaaaaaaaaaaaaaaaaaaaaaaaa

SEQ ID NO: 193 - DNA, 485 bp, Homo sapiens
ccaaagccatccattccaaggctgccaggaaatgaatgctgcccaacaacatctccattttgaaggtggtaatcattgaagaaatcgggacttatggctccttcagaggcaattaatccatctgagttgtagaaaaggtcaggtctttcgagaatatctccttcatgaatgtatggctcaattcgatcatcaccatacaagtactgctcactctcatccatctgacgactctctaccatctccagccactgagagttatgccagcgaaacttttcactctgaattttcttagcccattcttcatcatattccgctataatatctaatgtattatcacagacctttcggatttcattattcttatcatgcattaggtctatgagatatgctggagcctgtgtttccttgattatgacgtctcttgtggcttggtggaaaaccatctggtagaagacataaattatctgacacacaaattcatcatc

SEQ ID NO: 194 - DNA, 370 bp, Homo sapiens
  misc_feature 139, 163, 186, 190, 218, 302, 339: n = A,T,C or G
ctggtgcttgctgaaacccaggagctgaacagtgaggaggctgtccaccttgcttggctcactgggaccaggaaagcctgtctttggttaggctcgtgtacttctgcaggaaaaaaaaaaggatgtgtcattggtcatnatatttgaaaaggggaggaggccnaagttgttcccatttatccagtnttgnaaaatatttgacccccttggctgaattnttttgcaaaactactgtgtgtctgttcactaccttttcaggtttattgtttttatttttgcatgaattaaaacgttttaatttntttgcaaacaaggtctaaatgcggagtcaaaaatggnactgaatggggagggatcctttgtgttctca

SEQ ID NO: 195 - DNA, 429 bp, Homo sapiens
cctagagagctagagaagcaagtaagggccagggccagagtcggcttcaatggaacaacagcccagtgccctaaggcccctaactcttgctggctgtttcttgaccccaagccagggttgggagtcctctgggcatccattttttctaaaggaactggacagagtacacacaggaaaggaagctgtcaccctcttgccatctggctccaggggcctccagtccagcattcctccttcttcccttgattgggtggggccacatgatgggcagccaggctctgggctgtcccactagagcaggctgcaaacacagccatgtttcagtgaggcgttgatcttcttccctggtgtcccaacctaccagtgccacgttacagcccagagtgagttctacaagcgttgctggcctaatggatgggctgggggaag

SEQ ID NO: 196 - DNA, 282 bp, Homo sapiens
ctgggcccgcagtcggacctggtgagatcagaggagggggtgccaccagtctgtggacgaagatgagaagctggaatagagcagaaaacaggaggctgccactctccatctttcccaaagtcactccaggagcaagggtgtcatttactgaaatgacagactctccatttcacatttttcccccaagtgcagagtgcagggaagcagatgggctaaatttttagagtcagggttattaatgtatactttacatagtaaactttccccttttaagtgtgcagg

SEQ ID NO: 197 - DNA, 360 bp, Homo sapiens
gccaacatgccatccagactgaggaagacccgaaacttaggggccacgtgagccacggccacggccgcataggcaagcaccggaagcaccccggcggccgcggtaatgctggtggtctgcatcaccaccggatcaacttcgacaaataccacccaggctactttgggaaagttggtatgaagcattaccacttaaagaggaaccagagcttctgcccaactgtcaaccttgacaaattgtggactttggtcagtgaacagacacgggtgaatgctgctaaaaacaagacgggggctgctcccatcattgatgtggtgcgatcgggctactacaaagttctgggaaagggaaaagctccca

SEQ ID NO: 198 - DNA, 198 bp, Homo sapiens
ccagtatgtccccaggattatgtttgttgacccatctctgacagttagagccgatatcactggaagatattcaaatcgtctctatgcttacgaacctgcagatacagctctgttgcttgacaacatgaagaaagctctcaagttgctgaagactgaattgtaaagaaaaaaaatctccaagcccttctgtctgtcagg

SEQ ID NO: 199 - DNA, 412 bp, Homo sapiens
ggccacatgtagacagctaggtcagtgctttttcctcttagggtttctttgcagaaagaaacctccagcaagggaagagaggtgtgtgtccacaggaaggggctccgtggggatcccatgaagggatttgagctctttcagctccatgtcatttaacttttttgtttaaccaccttggctttctctccttttttgctgtcctccttacggaccagttaccagattcagaggctaatagttagttacttgttaatgctagtcacagccaggaggtcagaaggaattttctacttctggatccaaatgttacctcttaggggaagttatgccccctcaactattgtcttattataatgaatctttcctttttggtccttttaagtaaccactcaaaacttttcatttcactgaa

SEQ ID NO: 200 - DNA, 443 bp, Homo sapiens
ccaacaggtatataaaagggtgctcaacataattaatcatcaaggaaatgcatataaaaaccactcgaagtactatctctcaccagttaggctagctgttatcaaaaaaaacaaaagacaacaaatgttgtgatggtgtggaataaaaggaactctgtgcactgttggtgggaatgtagattggtacagccattatggaaaacagaatggaagtttctaaagaaaaataaaactaccatacgatccagcaatccctcttctgggcatatactcaaagtaaatgaaatcaccaccttgtaaatatatctgcagtccgtgttcattgcagcattattcatagtagccaacatggagacaactgaagtgtccgttgacagatgaataaagaaactgtgtatatatatgcctacacacaatggaatattattcatccctaaaaaaaa

SEQ ID NO: 201 - DNA, 439 bp, Homo sapiens
ccaaggtcagaggctgatgcaacaggccctcttctccccagggccaggctcctgtccagcctgggcactgcccagagtgatggcattggtccggatgctgttctgtctctgcttggacaccttcgcaaagatttctttcaggacagtctcaaaggctagctcaacattggtagagtccagggctgaggtctccgggaagagcagtccattgttttcagcgaacattcgggcctcctcagtgggcacttcccgggcctggctgaggtcacttttgttacccacgagcatgacgacgatcgtggcttcagcatggtcatagagctccttcagccatcgctccaccacagcataggtctggtgcttggttaggtcaaacaccaggagggcccccactgcaccacgatagtacccttgaagacaaagttataatcttcctcag

SEQ ID NO: 202 - DNA, 411 bp, Homo sapiens
aaatgcactgacatttttatttcttgcaacccgagttaaattcacgtttcatttcctacagaatgcaaaaaagacatccacaaggcaactccacttctaagttacaaattactagatgttagaaaactttctcgaaggacagtgcactattttttattttttgagacagagtcttgctctgtcgccttggctcactgcaagctccgcctcctgagttcacgccattcttctgcctcagtctcccgagtagctgggactacaggcgcccgccaccatgcccgactaattctttatatttttagtagagacggggcttcactgtgttagccaggatggtctcgatcttctgacctcgtgatccgcctgccccggccttccaaagtgctgagattacaggcgtgagccaccgtg

SEQ ID NO: 203 - DNA, 366 bp, Homo sapiens
cactgagccagcaggtgccagggagccactcgccccccatagcttctgcacacctcagactcaccccatcaccttggcagcaaagcactggctctgccgtctgacccctgatccaggcagccccctccgcagagaaaagggttggggagaagcctctgcagtcctggaagatgtggggtgctgggtgagaggcatcagcccccacaagtatgtttttgtgtcttaagatagcagtttactttgaaaaagtgaaaaaggcttccgggctgtcctctgcccagtgagatggaggacgctagagaaagtgctgagtgtcccgagagaggcccccgagccagtgcatggaggtccttcggcctggctcag

SEQ ID NO: 204 - DNA, 421 bp, Homo sapiens
  misc_feature 32, 339, 363: n = A,T,C or G
cctgtgccatctggttccacattcagggcctncactatgccatcctgtaccaccatggagaacctcttgagacgtcgattcccaaagatggacaccagcgaatcatctagtaataagtctgtctccttcccaaaggccccagtgggatcagccaggagccgaaccttgccttccgccttgtgggctcggccccactcgccagtcacaaaggcatcattaacactcagacaggccaccacctggactcccttggccttcagagcctcagcctgctccacaaaccctggcaggtgtgtcttggaacatccaggggtgaaggccccaggaactccaaacagnacacccttcttgcccttgaacagntctgccaggttcaccttgttccctggctccccttcaaacacctccactgctgggatgg

SEQ ID NO: 205 - DNA, 561 bp, Homo sapiens
aaatgccatgatccaggatggattttagatcttgttgaaagcagccacatccatggactgcacatagtcctcaaaagcagtgatctgctcctccagcatatctgttccaactttatcatcttcaactacacactgtatttgaagtttcttaattccgtatcccactggaactagtttagatgagccccagactaagccgtctgcttgaatgcttctgacgcactcctctaatttcgccatatctgtctcatcatcccaaggtttcacatctagtaagatggaagacttggcaacaagtgcaggttttttggctttctttgattcatattgtgcaagacgttcttcccttagcctctttgcttcttcactttcctcctcatcatcagatccaaagaggtcaatgtcatcatcatctttactatctgtagctccacttcctgtagtgtcttccacatcggcaggaccatatttgcccaaagctttcttcactcctggcaggctggccttttccttttcgtaagacttgatgtgattataccaacgtagggcatgacacaagtc

SEQ ID NO: 206 - DNA, 274 bp, Homo sapiens
ctgagaattcgtccgctcccgaggctgagcagggcggggctgagtaaatgccggcttaccatctctaccatcatccggtttagtcatccaacaagaagaaatatgaaattccagcaataagaaatgaacaaaagattggagctgaagacctaaagtgcttgctttttgcccgttgaccagataaatagaactatctgcattatctatgcagcatggggtttttattatttttacctaaagacgtctctttttggtaataacaaacgtgtttttt

SEQ ID NO: 207 - DNA, 554 bp, Homo sapiens
cctgggtgggcccttgtcccctgcaacacaggtcagcgccaacccccacctggtctgggcctgatcaagtggggagaggagcctttgcaggctgaattttcgcagcatggacccagaacttccaatactatgttgaataggagtggtgagagagggcatccttgtcttgtgccggtttccagcttttgccccttcagtatgatattggctatgggtttgtcataaatactcttattattttgagatatcttccatcagtacctagttgattgagagtttttagcatgaaggggtgttgaattttgtcaaagaccttttctgcatctattgagataatcatgtggtttttgtctttggttctgtttatatgctggattacatttattgatttgtgtatgttgaaccagccttgcatcccagggatgaagcccacttgatcatggtggataaagctttttgatgtgctgctggatttggtttgccagtattttattgaggatttttgcatcaatgttcatcagggatattgttctaaaattctctctttttgttgt

SEQ ID NO: 208 - DNA, 290 bp, Homo sapiens
ccatcattgagtatctagaggagacgcgtcccactccgcgacttctgcctcaggacccaaagaagagggccagcgtgcgtatgatttctgacctcatcgctggtggcatccagcccctgcagaacctgtctgtcctgaagcaagtgggagaggagatgcagccgagctccacgctgatctgaagatacaggagagggacgaactcgcctggaagaaactaaagcttgacggcttggacgaagatggggagaaggaagcgagactcatacgcaacctcaatgtcatcttgg

SEQ ID NO: 209 - DNA, 423 bp, Homo sapiens
cctgacattcctgccttcttatattaataagaaaaataaaacaaaatagtgttgaagtgttggggtggtgaaaatttttgaggggtggtagggagagagaatgggcgatgtttctcagggctgcttcaagtgggattaggggcagcgtgggaacctagagtgggagagattaagctgaagggaggtcttgtggtaaagggtgatattgtggggatgtaagaagaaacatttgtcatatagaatgattggtgatggcctggatacggttttggatgaattgagaaactaaatggaataacagaaggagaaaaacaggtataaaaggtctaagaattgggaggacctaggatatctgattagagagtgcctaaggagattcagcagagtcctgccagcaaagattatttatttacttcaagagtt

SEQ ID NO: 210 - DNA, 462 bp, Homo sapiens
  misc_feature 236: n = A,T,C or G
ctgcacatcaaggacatcttcgggaagttcaggattgccgtagctaaactgaaaaccaccatccatggactctccaaaccaaacgtgtttcttctcagcactagaatctgtccaccagtgtttccgtggaacattcaaaggattggcacttatgcatgtttccccagtttccatattacagaataccttgatagcatccaatttgcatccttggttagggtcaacccagtattctncactcttgagttcaggatggcagaatttcaggtctctgcagtttctagcggggtttttacgagaaccatcaggactaatgaggctttctatttgtccattaacagacttgagtgaagtcataatctcatcggtgttgattttgaaatccattggttcatctccataatacggggcaaaactgccagctttttcacctccaatcccagcaatggcagcggctccaac

SEQ ID NO: 211 - DNA, 589 bp, Homo sapiens
  misc_feature 540, 582: n = A,T,C or G
ccacaggggctcacctgggccccatggcttttcacctaagtgggtcctgccccctcccccatgaccttcaggagcaccccatattatttccaaaaatatcttggacagacaaggaccaaaatgccaaaatctcagcggactcgataatctgcctgctgatgttccttctgtggctgtgtctattttcagttctgctctaacacggcatgccctttctcagcccaggaaacagcatgtggttcagagaaaagagcgacaaggaaaagttaggactcctgaggtccgaacaggggcttctgttgcccacttcacaacacccagtgatcaccggtgtgcaattgcctccttggctctgagggatgttttgcgctcccttttctcatcattggggttagcgggtgcagacaaattcagcaatagtatgcagatcagcccctcaccacctcattgttctcatctggaactgaaactttctggatttctcttgaagtgctacactgcactgaatgtaaggaattgttgcttgtggaagtttctcancgtttctggctgtcttagggctggcctcagaacccagcattnctgttac

SEQ ID NO: 212 - DNA, 479 bp, Homo sapiens
ctggatacgattcagggtgaactaaatgcacctactcagttcaaggtaaccacttctaagaccataattctaaaatttgtttcaggtggatctgcagacaaaaagttatgtaatcttcaagcaggaattttgtatacttgtgtttcttatctccaattagaacttcctttctaaagtaaactcagtcatggttcttttggctagtattagtgtttcgaatataatgtacagagagagaaatagaaatttttaatagatggttttgaaaccatcctttcagaagaaaacattgtcttttacaagtcttcgtcggcagttgtaatttgactcagtcttaacttttagggccgactaaatgaattgatgtctcaaatcaggatgcagaatcattttggagcagtcagatctgaagaaaggtattacatagatgcagatctgttacgagaaatcaagcagcatttgaaacaacaacaggaagg

SEQ ID NO: 213 - DNA, 264 bp, Homo sapiens; identical to SEQ ID NO: 143

SEQ ID NO: 214 - DNA, 219 bp, Homo sapiens; identical to SEQ ID NO: 148

SEQ ID NO: 215 - DNA, 586 bp, Homo sapiens
ccacctcaagatgaaaacagataactccctaaatgttaactggctctactcccctaatattaaacataaaaaccacatgggaaatatagaaattcaaatagaagtaacataaacctgtcataaatcgtaaacaaaaaactatttgtgggacagcatggatgacaaatggtctactgtgtaaattttagaatgaggcagacaaaagttagaaggccggttaattttcccctccttctcctgcttcagcttcgtctccttgggtatccgatgtccacaatgtcaagttgtctctcagtaattgcattattagcgtgctgtctttgtatgactcttcacttaatgtatcaagttcagcaatggcttcatcaaaagctgtctttgcaagagagcaggctttctctggggagttcagaatctcataatagaacacagagaagttaagggccagacccagtctgataggatgtgttggttgcatttcctttttgctgatttcaaaagcttcttggtatgcttgttgtgactgatcgacaatccctttcttgtcatcaccagcggcaacctcagccaagtaacggtagtaatt

SEQ ID NO: 216 - DNA, 501 bp, Homo sapiens
aaattcttcattttaccagcaactgctgacatcaaagtctcccctcccccaacaacaaaaatacaattaaaaaaaataaataataaagtcatttgtgatcgttgctgtggttctgagctgcaaaggcactttcaaatacagaactacttgtacgtcatcataaaaccaatatacaaaaacaactcaagagtcaataaatataaataaaactatgatctaagactgcatcaccattaggacatctggcagaagtgggagctcaaagaccagggggctgggcaggctcctgggagcctgatccgagaccgtgtcggctgcaaggggacacacaaccagggtactgttgactagctttttgcatagctgtgagatgcggcactcgatttcccagccaaccacagaaactaccattgccagtgtaagccagcttgtcaaaacttaaattaacacagggattctaagtcagcaacggcctcagactcgagtatgacacgacagttt

SEQ ID NO: 217 - DNA, 62 bp, Homo sapiens
  misc_feature 43: n = A,T,C or G
aacctactagagtctcaatatctgctggttaccaccatttagntacaagagaaatgaatgaa

SEQ ID NO: 218 - DNA, 539 bp, Homo sapiens
aaatctttgtcattcacagacagttgttttgcttcttccttaaagcatttgcaacagctacagtccaaaattgcttctttaccaaggatatttacagaaaagactctgaccagagatcgagaccatcctagccaacatcgtgaaaccccatctctactaaaaatacaaaaatgagctgggcttggtggcgcgcacctgtagtcccagttactcgggaggctgaggcaggagaatcgcttgaacccgggaggtggagattgcagtgagcccagatcgcaccactgcactccagtctggcaacagagcaagactccatctcaaaaagaaaagaaaagaagactctgacctgtactcttgaatacaagtttctgataccactgcactgtctgagaatttccaaaactttaatgaactaactgacagcttcatgaaactgtccaccaagatcaagcagagaaaataattaatttcatgggactaaatgaactaatgaggataatattttcataattttttatttgaaattttgctgattcttt

SEQ ID NO: 219 - DNA, 253 bp, Homo sapiens
  misc_feature 157, 163: n = A,T,C or G
aaaatggtgccctaccattgacacatgcagaaattggtgcgttttgcttttttttttcctatgctgctctgttttgtcttaaaggtcttgagggttgaccatgttgcgtcatcatcaacattttgggggttgtgttggatgggatgatctgttgcanaggganaggcagggaaccctgctccttcgggccccaggttgatcctgtgactgaggctccccctcatgtagcctccccaggcccagggccctgagg

SEQ ID NO: 220 - DNA, 297 bp, Homo sapiens
ccagccggtatggccggctctgcttgatgtccacgctgttgatgactttgttgtgtcctgtaatctcgcccacagaagagccactatcccagaggaagactgctccaaacttctcccttccttccccgaccacggcgatcctcttactgtcttcagtccaagcaatgtctttgatcttcccagcgaaaggctggtactcatacttcaacaggtgctccttctgcgtggtatcccagatcctcagcttcccagacacatctccggaggcaatgtagaatccgctgggcgcatacttgg

SEQ ID NO: 221 - DNA, 580 bp, Homo sapiens
ccagagcttcatccagagctcactggaaggtggcttggcaggaagagggaatcttcctacagccctcctccaagggggacagaggctgggggcagagaaggaggcatttaagctttgctagcctcctgctgcctctgaggctgtaggacacgtcattcaaacctaccatcaaagtaggcttctgatttcaacttggatctcacggtagcccagtgacaccgcagcagccatgatgggatgtaggcaggagagcggtggcctggaaaccgcttctagacaatcctgtattatttagatctacatagagatacacgaaaaccctttataccaaataagagtaaataattataccaatataaacagggccgttgaccctttcattttattaaaatggcacataattattaaaacagcatactgatcactttatacttctgctagcccccaggggagctgctgggggcggcatgtgagtgccctcccgaagggtacagattcatgcattgagcaattcgtgttctttatcgattttcccaacagcatcaggatttgagagtgggtcgaggtcagcgaagaggct

SEQ ID NO: 222 - DNA, 548 bp, Homo sapiens
  misc_feature 303, 304, 374, 377, 451, 540, 542: n = A,T,C or G
gctaggtaggggcaggtgggtgatctctaagctgcaaaaactgtgctgtccttgtgaggtcactgcctggacctggtgccctggctgccttcctgtgcccagaaaggaaggggctattgcctcctcccagccacgttccctttcctcctctccctcctgtggattctcccatcagccatctggttctcctcttaaggccagttgaagatggtcccttacagcttcccaagttaggttagtgatgtgaaatgctcctgtccctggccctacctccttccctgtccccacccctgcataaggcanntgttggttttcttccccaattcttttccaagtaggttttgtttaccctactccccaaatccctgagccanaantggggtgcttatactcccaaaccttgagtgtccagccttcccctgttgtttttagtctcttgtgctgtgcctantggcacctgggctggggaggacactgccccgtctaggtttttataaatgtcttactcaagttcaaacctccaccctgtgaatcaactgngnctcttt

SEQ ID NO: 223 - DNA, 546 bp, Homo sapiens
ccacttccatgccctctccagaccaggagacacctgctgctgacctcgtggaaaacttagattttgacattctgatgcttcggaagtggtggctcctcctccctcacccctccgccacctgtgggcctcctctctgcatctcaagagaacaaccagatctttggactcctggggtgtgtgccatgcaatttagacgaagtgctttgaaaatatgccattcagtctctgactaggaaaataagtctgacctgataggtctgatgtcatcagctcttcaacatgagacaaaagaggggattttatgttttgagtcattagaatgatataataattttctgaattgacatctggatgttgaaattaggatggtgcaaaaggggtccagggcctcaggctgggcgcagcagccagctcccaatgacgcagaagctgcttcaaaaccccctcaacaaagaggggcacatgcaagtcaccaaagtgggaagccttcaccaaggccacacccaaagtctactgattgtctgtctaaagttcgttgattcctgg

SEQ ID NO: 224 - DNA, 478 bp, Homo sapiens
  misc_feature 428: n = A,T,C or G
ctgaaccctcgtggagccattcatacaggtccctagttaaggaacaagtgattatgctacctttgcacggttagggtaccgcggccgttaaacatgtgtcactgggcaggcggtgcctctaatactggtgatgctagaggtgatgtttttggtaaacaggcggggtaagatttgccgagttccttttactttttttaacctttccttatgagcatgcctgtgttgggttgacagtgagggtaataatgacttgttggttgattgtagatattgggctgttaattgtcagttcagtgttttaatctgacgcaggcttatgcggaggagaatgttttcatgttacttatactaacattagttcttctatagggtgatagattggtccaattgggtgtgaggagttcagttatatgtttgggattttttangtagtgggtgttgagcttgaacgctttcttaattggtggctgcttttagg

SEQ ID NO: 225 - DNA, 450 bp, Homo sapiens
cctcgtggttcatgggccggtagtcctggggttcacagaagttcgggtgctgagggaagaactccttgtagccgcctttcaggatatacatctcagggtagtagaggctggggtagtcgttgacagcacggtctcgttccctgatgaaacggcacatgcggggcccacgctcagatgagaattcacagtggaaaatgaggatgactctcttgtccaggctacagggcgcgatggggctcttcagtaggaagctctcggcgtcgcgttccaggggcaagttcaccgcagtcttgatgtgcccgccttcatattcataggggtatctgcagtctacaatcacaaacttatccacgatgttgctgaacttgcccgtcaatagggccaccatcgtttctggtgagatgtacttgaggtcttggtgctttccgtctactgtctgtaggaggaagg

SEQ ID NO: 226 - DNA, 449 bp, Homo sapiens
cctgtgtccaccacacctgggatcattttgatagctgtattcacttcactccatttgtgtacccggtcaaacttccagtccaagataaaattcccattatctgtcaccacaggaccagccttgttgacagccattcgaagttcaaccacgcccccaaacttctggctcacagctcggctcactgggacataggccattgggatgacctcgatggggattcccttgtgccactgatccccgagattcttcgaatctttcctgaaatcagcgatcacgatgaagcgactagcatagccagccacaatcttctcctgggtcaggcagcctccgccacccttgatgagattgagatcagcatctacttcatcagcaccatcgatggcaaggtcgatctctgggtgtcgatccagatcactgagggtcaagccatactgcaggatgagctggcg

SEQ ID NO: 227 - DNA, 568 bp, Homo sapiens
ccttcattttagctaagtttagaatttatattaggcaactatgatttgagtggttattcattgagtaattttccactataaagaattttattgaacatttattaaaaaataatgtaatgcatggtcaaaaaatatgtaattcatggtctggacactgacgttgtttagggatttagtcatcaaggacagccctctgttgtttctaatgccgtactaatcaagactgtatggacacttgcatcttaagtactaaggaattactagtgattgttttattttatccatgtactcttttagtatttaataattaaatacctattcttagtgtttgacactccatatttcttttttttggaaatgaaacaaatatgcagtccaaaattcaggaactactagagtgaaatgatattaagtggaaaccagagataaatgctgttaatttaacaagtagattcttctccaaagaatgatgagtgattcttgggaagataaatgttaatgttcccaatagtcaagcttgtcttgcagtagtgaaaagcttagatgagtacggatacctcatttgaaa

SEQ ID NO: 228 - DNA, 580 bp, Homo sapiens
ccaggctggttttgatctcctgacctcaagcgatccactgtcctcggcctcccaaagtgttgagattacaggtgtgagccaccatgctcgctgagagcagatatttgaaatgtcactttgagttctgagaaaaagtaaaaagccagaagacatactagatatataaatatattactgcttaaaaagatttcctaaaaagaaatgtatcaagtgtatgaatcaaagtctgaaagaaagatgaagagccaccagacttctaggtaggtttacatccatcatgttcctcttgactgcctttgtttgtcgtttagttttttgctccactcaagcctgttagaatcaccatggaatacagctccagtgggaaggccactggagaagctgatgtgcactttgagacccatgaggatgctgttgcagcgatgctcaaggatcggtcccacgttcatcataggtatattgaactgttcctgaattcatgtccaaaaggaaaataagactctaggggctccagataataagggtgaagcaagaagcatttcatttgcacatctttcttggacttgggatatacagttcc

SEQ ID NO: 229 - DNA, 228 bp, Homo sapiens
ctgcctgaggaagttgatctcgtcggtcagcccttccaggcgagactccagctctaccttgttcatgtaagcttcatccacatccttcttgatgaggacaaattcgttctccatctctgtacgcttattgatctcatcctcatacttgttcttgaagtcctccaccagcccctgcatgttgccaagctccgcctccagcttcagcttctcctggcccagagtctccag

SEQ ID NO: 230 - DNA, 149 bp, Homo sapiens
ccatattgacagaccaatctatgggactagggggattggcatcaagttgacacccttgaacctgctatggccttcagcagtcaccatcatccagaccccccgggcttcagtttcctcaatcatagaagaagaccaatagacaagatcag

SEQ ID NO: 231 - DNA, 503 bp, Homo sapiens
ctgctgtggttgctcccattacaacgggctatacggtgaaaatcagtaattatggatgggatcagtcagataagtttgtgaaaatctacattaccttaactggagttcatcaagttcccactgagaatgtgcaggtgcatttcacagagaggtcatttgatcttttggtaaagaatctaaatgggaagagttactccatgattgtgaacaatctcttgaaacccatctctgtggaaggcagttcaaaaaaagtcaagactgatacagttcttatattgtgtagaaagaaagtggaaaacacaaggtgggattacctgacccaggttgaaaaggagtgcaaagaaaaagagaagccctcctatgacactgaaacagatcctagtgagggattgatgaatgttctaaagaaaatttatgaagatggagacgatgatatgaagcgaaccattaataaagcctgggtggaatcaagagagaagcaagccaaaggagacacgggaatt

SEQ ID NO: 232 - DNA, 253 bp, Homo sapiens
ccaggctggtctcaaactcctgacctcaagtggtccacccgactcggcctcccaaagtgctgggattacagttgtgagccaccatgcccagcccccaacttgtaaacttcttaaatgcaggaactgtattttattaatctttgaatcaatattatctagcaccatggctagttaattatatatgcttcataattacctctttaaaaatcttaaaattgagagatgagttgagggtctaaattgcctttcaact

SEQ ID NO: 233 - DNA, 468 bp, Homo sapiens
  misc_feature 442: n = A,T,C or G
ccacagctaacatcattgcagcacctttactccttcggctgtgatccaatctccagctcactttttgccagcaccaacattggcctttgcagtccccctgactttcttcattctgttcttgcgttcctttcgttgctttcttgaggtctttttcttctcatacaggccatgtcttgcaagtctatgtttgggttcatttttctttgcataatccagggaatcataaatcatgccaaagccagttgtcttgccaccaccaaaatgagttctgaatccaaatacaaagatgacatccggtgtggtcttgtacattttggctagtttttcccgaatttctgtcttaggcactgtcgccttcccggggtgaaggacatcaatgaccatttgtttcctctgaagtagtcgggttggtcatgaactttctagtgcggatagttacggngtcgttcatgatggcgatctatcttc

SEQ ID NO: 234 - DNA, 354 bp, Homo sapiens
  misc_feature 34, 39, 79, 217, 225, 309, 328: n = A,T,C or G
ctgaaggagccggggagcagaaagtatatgcgtnaggtntgaggaagaaaatagattttggaagttatgagaaatgtanagagtgagttgagcatagtttgtgattttgagggcctctaacagtattaaagtagcggcagtcgctgcacacagacatgatggctaggctaaaacaggaaggtcaagttgtttggacagaaaggctacagggtgcagncctggctnttgtgtaagaattctgaccacactaaccatgcctaggaaggaaaggagttgttcttttgtaagggattgaggtttgggagattnatcggacaccgatcagcanggagagcacctgtgtttttatgagaa

SEQ ID NO: 235 - DNA, 538 bp, Homo sapiens
aaaaaaagcaacttccagggttgtcattgtacaggttttgcccagtctcctatagcatggtatagtgataactgattttttataacaatgactcagaggcattgaagatccataactatcttctgaattatcacagaaagaagaaagttagaagagtttaatgttaagtgtattaaaaatcatattctaattcttttaatttggttatctgagtatgataatataggagagctcagataacaagaaaaggcaattggttagaacactccattcccacaggatgtgcattaacagactttttactgcatatgtctttatatagtttgcaaactaattcaaccattttacacagcattaattttttttttaactgggttgacattgggctgaaacatttgcttatcatcttataattattttttcctgttctttaatggattttacccccatctgacatagtgtttggactttagtgtatgtgacacttcaagatcatctctgcccattctgatgatagttacaatgaggttacccatgg

SEQ ID NO: 236 - DNA, 411 bp, Homo sapiens
ctgttaaaaatgactacgagatgaccttcaataacgagacttccgtcatgccctgtgaggacgaccatcatttacctacggttcagtttgatttcacggggattgatgacctcgagaacaagtcgaaagactcacttgtagacatcatcgggatctgcaagagctatgaagacgccactaaaatcacagtgaggtctaacaacagagaagttgccaagaggaatatctacttgatggacacatccgggaaggtggtgactgctacactgtggggggaagatgctgataaatttgatggttctagacagcccgtgttggctatcaaaggagcccgagtctctgatttcggtggacggagcctctccgtgctgtcttcaagcactatcattgcgaatcctgacatcccagagg

SEQ ID NO: 237 - DNA, 372 bp, Homo sapiens
ccactttctgcccagggaggaggcattcctggagaggctagtgtgcattcatgtcttcccatctgacagagtatcctgaaatcagaccaagtcctgaaaacttccaaaatgggaagtatctgggaaaatgcactcttccctctcctgtagggtctcgtcccgcttctgcggtgtggtgggtctggagaagtctgtagagaagcactgcgcctttgcagtgtcttctgaagaagaagaggcgggatctcatttgcttttgaggagtcgggtgttcctggtcacggtcgcatgttgtcacgaatccagtctaggtagttggtaaccttggtgtacacacccgggacatccttctgtccacagcccaggccccag

SEQ ID NO: 238 - DNA, 463 bp, Homo sapiens
ctgctcagagtctcccattggtcagatgagaggtggggatgtgacaaggcaggctgtttagcacagtgacatgagcactggctttagagtccactgagcttgaattccatttccgccacttgttagctgatgtccttgagcaagtgacctcacctctctgagcctttgtctcatctgtaagatgggaatgatagaaaacatgcctcatgggacttttcaaataactaaaagtagaatgtccattcaacccagcaatcccactactcggtatctacccaaaggtaaagaaatcattctatcaaaagacaccggcactcgtatgtttatcgcagtacgattcacaatagcaaagtcatggaatcaacttaagtgcccatcagtgtgaactggataaagaaagtgtggtatatctacaccatggagtattatgcagccataagaaagaatgaaatcatggttgcag

SEQ ID NO: 239 - DNA, 273 bp, Homo sapiens
aaatgtctgcatgcagccagccatcaaatagtgaatggtctctctttggctggaattacaaaactcagagaaatgtgtcatcaggagaacatcataacccatgaaggataaaagccccaaatggtggtaactgataatagcactaatgctttaagatttggtcacactctcacctaggtgagcgcattgagccagtggtgctaaatgctacatactccaactgaaatgttaaggaggaagatagatccaattaaaaaaaattaaaaccaattt

SEQ ID NO: 240 - DNA, 238 bp, Homo sapiens
ccaccggggttgacctctctcgctagcagggcccacccagctcactccccgcgtcttccatcccctctaggattcccattgtcccctactccagcactaggcaggcacccccagcccactgcgactcccaccacgaaggaccccagccctctctcagccaacacggccccgcccaccgtctcagacatcgtgcttcttctggtgggccaggagtctctcctcgtcgtcgaaggtctgg

SEQ ID NO: 241 - DNA, 446 bp, Homo sapiens
cctacacgccgccgcttgtgctgcagccatgtctctagtgatccctgaaaagttccagcatattttgcgagtactcaacaccaacatcgatgggcggcggaaaatagcctttgccatcactgccattaagggtgtgggccgaagatatgctcatgtggtgttgaggaaagcagacattgacctcaccaagagggcgggagaactcactgaggatgaggtggaacgtgtgatcaccattatgcagaatccacgccagtacaagatcccagactggttcttgaacagacagaaggatgtaaaggatggaaaatacagccaggtcctagccaatggtctggacaacaagctccgtgaagacctggagcgactgaagaagattcgggcccatagagggctgcgtcacttctggggccttcgtgtccgaggccagcacaccaagaccactg

SEQ ID NO: 242 - DNA, 465 bp, Homo sapiens
aaatatcacaagtaggtcttaagtgtcatctggcatcttctttctgtagccaggtaactcttagatcttattcatcagcctgctgaacagttcctttttcagagacatagataccatccaaaaatttcctgatatccttgtttttaactgttgtggcttgctgaatcaaagccgctgaatttgaaacaagctcaatgtcatttccttcaaggattaattcatctttctgggcttgagatactgaacaagcaacacctggtctcatccgaaccctgcggatgtatttttcacccaagaaatttcggatttcaacaagagacccattctcctggataacaacgttgatgggggaagtgagcatacacagacctcatcttgtaacggaagcccagtgtaacacccttgatcatgttctgtacatgactacaaatagtccgaacggtagccagttcctttctgttaccc

SEQ ID NO: 243 - DNA, 399 bp, Homo sapiens
aaaaattttagcaggaaaacaaaagccaaaccttggaaagtacgatgatcctcctgactggcaggagattttgacttatttccgtggatctgaattacaaaattactttacaaagattctagaagatgacctaaaagccatcatcaaacctcaatatgtagaccagattcctaaggctacaaaggggacagtgggatctattttggaccgaaaagatgaaacaaagacacaggcaattgtatgtcagcagcttgatttaacccacctaaaagaacgaaatgttgaagatctttcaggaggagagttgcagagatttgcttgtgctgtcgtttgcatacagaaagctgatattttcatgtttgatgagccttctagttacctagatgtcaagcagcgttt

SEQ ID NO: 244 - DNA, 388 bp, Homo sapiens
  misc_feature 328, 329, 350: n = A,T,C or G
gtttcccaggcccactgtgcctcagagaccagggctccagcccctctcggagaagtctcagctaagctcacgtcctgagaaagctcaaaggtttggaaggagcagaaaacccttgggccagaagtaccagactagatggacctgcctgcataggagtttggaggaagttggagttttgtttcctctgttcaaagctacctgtccctaccccatggtgctaggaagaggagtggggtggtgtcagaccctggaggccccaaccctgtcctcccgagctcctcttccatgctgtgcgcccagggctgggaggaaggacttccctgtgtannttgtgctgtaaagagttgctntttggttatttaatgctgtggcatggatgaagaggagg

SEQ ID NO: 245 - DNA, 590 bp, Homo sapiens
  misc_feature 587: n = A,T,C or G
ctgccgtgtgaagcccacaataaatttaggatgaagaatacggtctgtgtatccaagacagcagtcaaagttgcttgcttctgattcgccgcagaggtggagtagcagcactgacatcaaagcagccaggagcaaactcttggtacagcacatggtttttagctcaaagaacagatctgctaaaacaaatacaagttattgattcactcttctcaacttgacagtctacctgtggtataactgtcaggtaaaaacatacatctttacaacttggtggtcccaagttaaaaaaaaaaaaaaaaaccaacaacaaaaaaaaaaacaccatttcacagacaggaaataaacaacatgaaaacagctcaagaaatacactaacgagcaaaaatatatgaatatatggggaaagaggaacgtgttgttttgacttaactgaagaaaccaagaggaaactggtctacgtatgaaaatgtgcatcctggaaagtcaggtgtcaagattttcgagtaggaatctatatgacttgaatctccccctatttcctgaataaaagtgacatctttcagtatttatacttcatggctcanaca

SEQ ID NO: 246 - DNA, 586 bp, Homo sapiens
  misc_feature 543: n = A,T,C or G
ccacggggactgttattcgcaagctggttttctagacctgttagctggaagcatggtgagcaccatttctggacgctcaggccgtgtcgggcttcagtcatctccaccacacaggtacagcagcgctttctggtagtcgcccttagtgtcttgctggatataatagtacagggacttgccgtactttctcttgaattcagacctaattttcaacatgtccacttcactgcgggagaccatgattctgatcaggaccttatctcgcgtccccttgcccttcatggagtcatacagccgatcagcaaaatacaggggcttgttctgaatgcactgaaccaggttcaggaaagcattttccaggtctcctttaacctctttcctgatgctttccaacatgtcataagggctgtaactcttgtacctatcaaatactttctggaggtggggcacgctccgctcggtcatgatgctgatccacttgggaacatcagttcctttcctcttcactccagcgtcatagagatcccgagcatcttggtcaantcagttcataatcaatgacagagccatcctctgctcttctacc

SEQ ID NO: 247 - DNA, 435 bp, Homo sapiens
ccaggctggtcttgaactcctgacctcaagtgatccgctcgtctcagcctcccaaagtgctaggattacaggcgtgagccaccgcgcccggcccatactaactgttatcacgagtgttcagttttcatatttatgctcacttgctggtccgcctgcagatgactctgaaggagtttgccataatgaatgaggaccaagatgatgaagagtttctgcagcagtaccggaagcagcgaatggaagagatgcggcagcagcttcacaaggggccccaattcaagcaggtttttgagatctccagtggagaagggtttttagacatgattgataaagaacagaaaagcattgtcatcatggttcatatttatgaggatggcattccagggaccgaagccatgaatggttgcatgatctgccttgccgcagagtacccag

SEQ ID NO: 248 - DNA, 299 bp, Homo sapiens
cctgcagagtgtccctcccttggctccagaacgaagatccacacttgaggactactctcagtcgctgcacgccagaactctgtctggctctccccgatcctgttctgagcaagctcgagtcttcgtggatgatgtgaccattgaggacctgtcaggctacatggagtattacttgtatattcccaagaaaatgtcccacatggcagaaatgatgtacacctgatagcaagaagctaattcatatgctttaaaccaatgaaggcttgtcaaagagatttagttaatggcagaccttgtgg

SEQ ID NO: 249 - DNA, 186 bp, Homo sapiens
ccatcaccatgtcacccacaccagcagcgggaagtctgttcagccgtcccttgatccccttcacggagatgatatacaggtttttggctcctgtgttgtcagcacaattgattacagctcctaccggaagacccaaggaaatccggaatttcgcaccagaggacccaccacgtcctcgcttcgaca

SEQ ID NO: 250 - DNA, 329 bp, Homo sapiens
cagattctgcgataatgtgtggacttttgtactgaatgatgttgaattcagagaggtgacagaacttattaaagtggataaagtgaaaattgtagcctgtgatggtaaaaatactggctccaatactacagaatgaatagaaaaaatatgacttttttacaccatcttctgttattcattgcttttgaagagaagcatagaagagactttttatttattctagaattgcagaaatgactacactgtgctataccagagaattccagtagaaagaaacttgtaactctgtagcctcttacatcacctttattatacagcatgaaaaacca

SEQ ID NO: 251 - DNA, 457 bp, Homo sapiens
caaaggtcgcgataatattattgacctcttcctttatcagccacaatatcttaatgcaattcagacaatgtgtccacacattcttcgctatttgactacagcagtcataacaaacaaggatgttcgaaaacgtcggcaggttctaaaagatctagttaaagttattcaacaggagtcttacacatataaagacccaattacagaatttgttgaatgtttatatgttaactttgactttgatggggcttagaaaaagctgagggaatgtgaatcagtgcttgtgaatgacttcttcttggtggcttgtcttgaggatttcattgaaaatgcccgtctcttcatatttgagactttctgtcgcatccaccagtgtatcagcattaacatgttggcagataaattgaacatgactccagaagaagctgaaaggtggattgtaaatttgattagaaatgca

SEQ ID NO: 252 - DNA, 426 bp, Homo sapiens
ctgccgctgcaccttgggaaggtggtcctgtgcctggagtggacacaagcccctttgcaaagtctctgggtcattccagaggggaggctgacctttttgattctggggacattttttccacgggcactggatctcagtccgtggagagaacaaaacccaaggcaaagatagcagagaatcctgccaacccaccagtgggtggtaaagcaaagagccccatgtttcctgctctaggcgaggccagcagtgatgatgatctctttcagtctgctaaaccaaaaccagcaaagaaaacaaatccctttcctctcctggaagatgaggatgacctctttacagatcagaaagtcaagaagaatgagacaaaatccagtagtcagcaggatgtcatattaacaacacaagatatttttgaggatgatatat

SEQ ID NO: 253 - DNA, 177 bp, Homo sapiens
cctgacagacagaagggcttggagattttttttctttacaattcagtcttcagcaacttgagagctttcttcatgttgtcaagcaacagagctgtatctgcaggttcgtaagcatagagacggtttgaatatcttccagtgatatcggctctaactgtcagagatgggtcaacaaac

SEQ ID NO: 254 - DNA, 317 bp, Homo sapiens
ctgatcaagactggagacaaagtgggagccagcgaagccacgctgctgaacatgctcaacatctcccccttctcctttgggctggtcatccagcaggtgttcgacaatggcagcatctacaaccctgaagtgcttgatatcacagaggaaactctgcattctcgcttcctggagggtgtccgcaatgttgccagtgtctgtctgcagattggctacccaactgttgcatcagtaccccattctatcatcaacgggtacaaacgagtcctggccttgtctgtggagacggattacaccttcccacttgctgaaaaggt

SEQ ID NO: 255 - DNA, 469 bp, Homo sapiens
ccataaaggcactacggcatgttcataaacaccatcaagtaaaagaaaggggaatcaagatgttctcacttcttttctgctccaccttaatactccatctagccactggtatggagcatgtcatcaactcattcttctcacaagctagcaagggaattaaacattttatcagtcaaccctatgctcaccaagtgagccaatgttacacagtgattttgtgcatccagtgactgagaactacaggcaaggataggccctgactgttaataaattggtcgtggctattactagaaaattatgggtgcaggcatttacctatacaatgacctgcttactgtggcagctaacaatatagtcaaaccagtctattaccatatgatgtcctattaacaagagagcccagttgaaggatgtttcatacttttagaaagcctaatttcttactgtaatatcctcccatccctctttt

SEQ ID NO: 256 - DNA, 219 bp, Homo sapiens
ctgaaagaaacctttgggaatggatatcagaagatttggccttaatatatttccattgtgaccagcagcaggcttttttcccccaagaagatgatcaaaacaaaggatgatctcaacaagagctgtattttaagtatttagacagttctttgttagctggtttctagttggttatctagttaccaatgctgcagtcctgcagtcacctatacattattt

SEQ ID NO: 257 - DNA, 474 bp, Homo sapiens
  misc_feature 430: n = A,T,C or G
ccaatagatttacagccatctaaagaagagcagaatgctctcaagagctgaattatgatgacttgtaggtattgattagatgagaacaccaaccccatattcagcagagagttagggaatgagaagtagaggggagatggtggtggagatcgtctttatgtagttttcaaagtcacttccgaaaaagaagatgaggtaatagttgaatatgccagcaacggacatgaggaacaggaagagtatgatgcgtttcccaaatatgtagccaggggtgctctgcgttctctctcctaggtaaccgacaaagtacttttgcctcacaaacaagtacatcagtccagcaaacgcagcaggaacttggctgcaaagtagccccgcagaccagagcacagcgaggagagtggggtacgcatctacacagttctggttngcagtgtagacccgctcaaaggcaggtgttccggtcctctggaa

SEQ ID NO: 258 - DNA, 399 bp, Homo sapiens
cggaaaatagcctttgccatcactgccattaagggtgtgggccgaagatatgctcatgtggtgttgaggaaagcagacattgacctcaccaagagggcgggagaactcactgaggatgaggtggaacgtgtgatcaccattatgcagaatccacgccagtacaagatcccagactggttcttgaacagacagaaggatgtaaaggatggaaaatacagccaggtcctagccaatggtctggacaacaagctccgtgaagacctggagcgactgaagaagattcgggcccatagagggctgcgtcacttctggggccttcgtgtccgaggccagcacaccaagaccactggccgccgtggccgcaccgtgggtgtgtccaagaagaaataagtctgtagg

SEQ ID NO: 259 - DNA, 321 bp, Homo sapiens
ctggaagaggaacatcaccaccccgtagccacaggcttgctgtccactaacttagatccctgagcacttgagaaagaacataggaagttcaacaggaagtttgaccctcatggatacttctctttaggccctgggtttcccaagtctccaacctgatcgttctttctgaccatttatgacaacttctggtttttctttgaaagcttgtttctaggtctcttccccagaatcccaggacatgagggagagaggggtcaggaggtataccatatttggtctaggcagagcttcttagacttttcagagactcagcccccaagg

SEQ ID NO: 260 - DNA, 360 bp, Homo sapiens
gtggatggcaacagtctaattgtaggatatgtaataggaactcaacaagctaccccagggcccgcatacagtggtcgagagacaatataccccaatgcatccctgctgatccagaacgtcacccagaatgacacaggattctataccctacaagtcataaagtcagatcttgtgaatgaagaagcaaccggacagttccatgtatacccggagctgcccaagccctccatctccagcaacaactccaaccccgtggaggacaaggatgctgtggccttcacctgtgaacctgaggttcagaacacaacctacctgtggtgggtaaatggtcagagcctcccggtcagtcccaggctgcag

SEQ ID NO: 261 - DNA, 303 bp, Homo sapiens
cctttactttattcagtgaaagtgtctatttagactaagaggtattttagtttcctgactcgagacatgttgagtaaaggtaatttgccagtcctgggtggggcaaatcctccagcctgatgtgtagggaagggagggggcctgaataatccctgaggagtagtagaatagcagatggaacactgagaagttatttccttgaggatagatttccacgatggaaaggaaatgagaggttctgagaggcgggctagtggcttgtactatagcataacctgcctttgctggtgtgtggcgattagg

SEQ ID NO: 262 - DNA, 433 bp, Homo sapiens
  misc_feature 424: n = A,T,C or G
gtggctcccaactttgaggccaatgccaccgtcggccgcatccgtttccacgactttctgggagactcatggggcattctcttctcccaccctcgggactttaccccagtgtgcaccacagagcttggcagagctgcaaagctggcaccagaatttgccaagaggaatgttaagttgattgccctttcaatagacagtgttgaggaccatcttgcctggagcaaggatatcaatgcttacaattgtgaagagcccacagaaaagttaccttttcccatcatcgatgataggaatcgggagcttgccatcctgttgggcatgctggatccagcagagaaggatgaaaagggcatgcctgtgacagctcgtgtggtgtttgtttttggtcctgataagaagctgaagctgtctatcctctacccanctaccactg

SEQ ID NO: 263 - DNA, 184 bp, Homo sapiens
ccagccagggctggtgctgtccccgcctacctccacttcctttcccttgctcactctggatccagtgacagcaggtgtcatgggtcaagcataaatcatatatagcattttcaggcatgttcctggtagttcttttgagtctgacattctaataaaataatttgtaaaaaaaaaaaaaaaaaaa

SEQ ID NO: 264 - DNA, 389 bp, Homo sapiens
ctgtgatgagttgataccagagtatctcaattttatccgtggtgtggttgactctgaggatctgcccctgaacatctcccgagaaatgctccagcagagcaaaatcttgaaagtcattcgcaaaaacattgttaagaagtgccttgagctcttctctgagctggcagaagacaaggagaattacaagaaattctatgaggcattctctaaaaatctcaagcttggaatccacgaagactccactaaccgccgccgcctgtctgagctgctgcgctatcatacctcccagtctggagatgagatgacatctctgtcagagtatgtttctcgcatgaaggagacacagaagtccatctattacatcactggtgagagcaaagagcaggtgg

SEQ ID NO: 265 - DNA, 475 bp, Homo sapiens
gaggaattggagaggccagaataatcagaaaagctttggagggggtaggatgtgacctacattttcagaacaagagtggagtagaaaaggcattccaggtgggataaacagcggaggcaaatacatgagagggaattaaatctgttgtgatttatttgatagtaagattgacctgcctggcatcgagttgaaatagaggcaaaagacactgaatatttgcaaggaggtccttagaatggagtgatatggaaataagcagccattataggttcttgagcaggaacattttgcatgaaaagcactgctttggaatgatgagtctagaaaggtaacactgacctctctaaggtggcattctagggagagacctgagtatttggggctgagattgagagaggagcttacttttcttggtatatttttatttactattcaagttctgcatcatgtgtgtttactgcctatttaataatta

SEQ ID NO: 266 - DNA, 104 bp, Homo sapiens
cctaggattgtgggggtaatgaatgaagcgaacagattttcgttcattttggttctcagggtttgttataattttttatttttatgggctttggtgagggaggt

SEQ ID NO: 267 - DNA, 470 bp, Homo sapiens
ctgcctgtcacagaatcccatttcaaagagacgggccatcagggctgctgtctgatcttcagaaattattagctgtgcagtgactggtggcccagcaaacagggccttgtatgcagaggcagcaacagacaaagcccccttcaccagtcctccagcaatgctgctcccatgatggtgccttgagtggtcatagctcttctgtctgctgtttacaagtcctgatgagcctctgggctctcctctgatctgatcagggactgaagaaacttctggtatggtaactggtaaatccactcctggggaaccatgatgatgtacacaaggagagctcctgggcagtgacggtggaagctccactacctctgggattaggggcactgtttccagagtctgtgaggtcgtgaggatgtcacttatgctgtgctcctgtggctggttctcccctccagggagtcttttcccagcctcag

SEQ ID NO: 268 - DNA, 369 bp, Homo sapiens
ctgggacccggaaggcgggcgctcctgtctttgtgctctttctaccgcccccgcgtcctgtcccgggggctctcctaggatcccctttccgtaaaagcgtgtaacaagggtgtaaatatttataattttttatacctgttgtgagacccgaggggcggcggcgcggttttttatggtgacacaaatgtatattttgctaacagcaattccaggctcagtattgtgaccgcggagccacaggggaccccacgcacattccgttgccttacccgatggcttgtgacgcggagagaaccgattaaaaccgtttgagaaactcctcccttgtctagccctgtgttcgctgtggacgctgtagaggcaggttgg

SEQ ID NO: 269 - DNA, 425 bp, Homo sapiens
ccaaaccaaccgcacccctgaatttctccgcaaatttcctgccggcaaggtcccagcatttgagggtgatgatggattctgtgtgtttgagagcaacgccattgcctactatgtgagcaatgaggagctgcggggaagtactccagaggcagcagcccaggtggtgcagtgggtgagctttgctgattccgatatagtgcccccagccagtacctgggtgttccccaccttgggcatcatgcaccacaacaaacaggccactgagaatgcaaaggaggaagtgaggcgaattctggggctgctggatgcttacttgaagacgaggacttttctggtgggcgaacgagtgacattggctgacatcacagttgtctgcaccctgttgtggctctataagcaggttctagagccttctttccgccagg

SEQ ID NO: 270 - DNA, 284 bp, Homo sapiens
ctggagcgctcacctggttgaattcaaagtcccagaaggccccgctggcgtgaagccggccccttacattttgcgaagtgcattatagtccttgtttttctctccctcgtgggggcaacgacccctcccctggcagtaggggtggggtaggtgactctcgctagatccctccaaagcagaccggtggcgatgtcagcggatgtcacgagctcgttagctgcgttcggggaaggttggggcgtcagggagctctcggatcacagcagcccccgccctctcctagg

SEQ ID NO: 271 - DNA, 406 bp, Homo sapiens
aaattttatttcaaaagcttggatagcttcaatatccaggttgtggcaaaatcaggacacgtgtaaaataccttacaatacattagattcccaaaaggtaccaaaaagtacagtaaaattaacacttccgttacaggaaatgtatgacgcaaataatataaaattaaaaggtgaaaaaaaggtgacactggtttcctaagatacaatttactctttacaaccagggtccacaggtccaggctgcagagcggcagcaggaagcagagcctcccacctgcttctgggggacctggtaataaaaatcagcccatgatggcgctatggcctctcagacaccacacgctgcctaaacacctagagctctggaaatagtcaacaggagagtgatttccatgggggaaatttt

SEQ ID NO: 272 - DNA, 56 bp, Homo sapiens
ctgaggttgtcagtacaatgaaaccaaactggcgggatggaagcagattattctgc

SEQ ID NO: 273 - DNA, 414 bp, Homo sapiens
  misc_feature 394: n = A,T,C or G
ccatcaatgactgcagcaaagcaattcaattaaaccccagctatatcagggcaatattgaggagagcagagttgtatgagaagacggacaagctagatgaagccctggaagactataaatctatattagaaaaagatccatcaatacatcaagcaagagaagcttgtatgagattacctaagcaaattgaagaacgtaatgaaagactaaaagaagagatgttaggtaaattaaaagatcttgggaacttggttctccgaccttttgggctctccacggaaaatttccagatcaaacaggattcctctaccggctcgtactccatcaatttcgttcaaaatccaaataataacagataacaaagataacaaaagctttacaagctgacttgganttgtgtgctgcttgccgtta

SEQ ID NO: 274 - DNA, 166 bp, Homo sapiens
  misc_feature 130: n = A,T,C or G
cctcggcctaaaggtctggagggtgagcgacctgcgagactcacaagaggggaagctgacagagatacctacagacggagtgctgtgccacctggtgccgacaagaaagccgaggctggggctgggtcancaaccgaattccagtttacaggcggatttggtcgtg

SEQ ID NO: 275 - DNA, 255 bp, Homo sapiens
atcgtgtgctgcctggaggagaagcctggagaccgtggcaagctggcccgggcatcagggaactatgccatcgttatctcccacaaccctgagaccaagaagacccgtgtgaagctgccctccggctccaagaaggttatctcctcagccaacagagctgtggttggtgtggtggctggaggtggccgaattgacaaacccatcttgaaggctggccgggcgtaccacaaatataaggcaaagaggaactgctgg

SEQ ID NO: 276 - DNA, 460 bp, Homo sapiens
aaacaaccaaaaagaattgtaagggtggcttgctgccaggcttgcactgccgttcctgggggtgtgcatcttcgggaaaggtggtggcggggcgtccactaggtttcctgtcccctgctgctccttccgtaagaaaatgaaatattctatgcctaatactcacacgcaacatttcttgtactttgtaagtcgtttgcgagaatgcagaccacctcactaaactgtaaacggtaaagagatttttacttttggtctccgtgggtcgcatctctactaaggtttacacaggaattccacctgaagacttgtgttaaagttctacagcgcgcactgttactgaacgtctttttcttcagcctatacgcggatccttgttttgagctctcagaatcactcagacaacattttgtaactgctgctgttgctttctacatacaccttataaagtgacatttcaaaa

SEQ ID NO: 277 - DNA, 348 bp, Homo sapiens
ctgttgatgccagtgtcctctaactcatgctgtccttgtgattaaacacctctatctcccttgggaataagcacatacaggcttaagctctaagatagataggtgtttgtccttttaccatcgagctacttcccataataaccactttgcatccaacactcttcacccacctcccatacgcaaggggatgtggatacttggcccaaagtaactggtggtaggaatcttagaaacaagaccacttatactgtctgtctgaggcagaagataacagcagcatctcgaccagcctctgccttaaaggaaatctttattaatcacgtatggttcacagacaattcttttttt

SEQ ID NO: 278 - DNA, 292 bp, Homo sapiens
cgcgaccattcggtggccgagagcctcaactacgtggcgtcctggaacatgagcatgctgcagacccaagacctcgtgaagtcggtccaggccacgactgagaacaaggaactgaaaaccgtcaccttctccaagctctgagagccctcgcgtcccaggccccagccagggggccggccttgtcccgcctcatccacagaaagggaggatgggcgatgacagttgtttctatgccttctgacccagtttcccagtttataactttatgacaatgagtttctcaagcccaagg

SEQ ID NO: 279 - DNA, 74 bp, Homo sapiens
ctgttgctgtcttcatgagggcagaggaggagccgggtggcagtgtggttatttggtcagagtgtcccctggga

SEQ ID NO: 280 - DNA, 197 bp, Homo sapiens
  misc_feature 160, 161, 169, 170: n = A,T,C or G
ccacaactgtgaagttagaaaagccctgtcaaagcaagagatggctagtgcttcatccagccaaagaggtcgaagtggttctggaaactttggtggtggtcgtggaggtggtttcggtgggaatgacaacttcggtcgtggaggaaacttcagtggtcgnngtggcttnngtggcagccgtggtggtggtggatatg

SEQ ID NO: 281 - DNA, 341 bp, Homo sapiens
ccttgctaaaaaggagaagcctaaaaaagataaaattcccacggcagttctgttcaactgtagcctgtgagtgcaggaataatgttcccgtggggaagcattatgcccagtggtttcttggtgtcaacgtgggaaagcccttgaggttttctgtcgctgtcaggaggaagcacgaaaactgtttatggaatccagtcgacgttcaggcaccgcgcgatgaacgcaaacatgtctgagacttcctctatcactttggctgtgggcttccccgccccgtggcccgccttggtgtccacgtggataagcagggggttgctttgcttcctgctgcggcccacgat

SEQ ID NO: 282 - DNA, 382 bp, Homo sapiens
ttttttttttttttttatgtgttgtcgtgcaggtagaggcttactagaagtgtgaaaacgtaggcttggattaaggcgacagcgatttctaggatagtcagtagaattagaattgtgaagatgataagtgtagagggaaggttaatggttgatattgctagggtggcgcttccaattaggtgcatgagtaggtggcctgcagtaatgttagcggttaggcgtacggccagggctattggttgaatgagtaggctgatggtttcgataataactagtatggggataaggggtgtaggtgtgccttgtggtaagaagtgggctagggcatttttaatcttagagcgaaagcctataatcactgcgcccgctcataaggggatgg

SEQ ID NO: 283 - DNA, 438 bp, Homo sapiens
  misc_feature 435: n = A,T,C or G
tttttttttatatcaaaacatttattttttgtgttacaaaaacacaaataaatccaagcagataatgaaataaacacatttttttagtgtcccatcctgggttctctgccctagaatgtattaagcaggtcaagtttaggttacttcaacacttcttctggatgctatgaagtctccatcttataaccatgtttctctagttcagctcgtaactgattagagaagtcatcctctacattgtcatcatcccaattatcctcccagacatgtgcatcttcatcttcatctaagccagcccagtcttcggcagggaactcttcaaactcgtcgtcttcctctaacagacctaagtctaccggctgctttttctctgacatctcgactgtccgcgcccaacacctcccagataagcagaaaagttggaaccctcactcntcc

SEQ ID NO: 284 - DNA, 238 bp, Homo sapiens
  misc_feature 216, 221, 228, 229: n = A,T,C or G
cctacccgccgcagtactgatcattctatttccccctctattgatccccacctccaaatatctcatcaacaaccgactaatcaccacccaacaatgataaccatacacaacactaaaggacgaacctgatctcttatactagtatccttaatcatttttattgccacaactaacctcctcggactcctgcctcactcatttacaccaaccacccanctatntataaanntagccatgg

SEQ ID NO: 285 - DNA, 275 bp, Homo sapiens
ccaattgatttgatggtaagggagggatcgttgacctcgtctgttatgtaaaggatgcgtagggatgggagggcgatgaggactaggatgatggcgggcaggatagttcagacggtttctatttcctgagcgtctgagatgttagtattagttagttttgttgtgagtgttaagaaaagggcatacaggactaggaagcagataaggaaaatgattatgagggcgtgatcatgaaaggtgataagctcttctatgataggggaagtagcgtcttg

SEQ ID NO: 286 - DNA, 485 bp, Homo sapiens
aaatagcttacaaggaatagtggttatatttatagaacattttataaaacagatttacacttgcaacaccaacaaaagcttgaaaataaaagtttacctaaagtaaaattggtggctgggtttggtggctcacgcctgtaatcccagcactttgggaggccaaggtgggtggatcacttgagttcaagaccagactggaggacatagcaagacctcgtttatattggggaaaaaaaaaattatcagggtgtggcatgcacctgtagtcccagctactctggaagctgaggtgggaggatttcttgagcctggaagattgaggctgcagtgagcaacaatggcaccactgcactcaaaaaaaaaaaaaaaaaattgagagtcaataactgcaataaacttttttaagtataatcaaatgagttcaactgtcacgttaagatgccttgaattcttttgattttctagttccaatttctagctttaat

SEQ ID NO: 287 - DNA, 505 bp, Homo sapiens
ccacagagatccctgacttcaatcaggatgacttggaagaggatgatgtgttcctactagatgtctgggaccaggtcttcttctggattgggaaacatgccaacgaggaggagaagaaggccgcagcaaccactgcacaggaatacctcaagacccatcccagcgggcgtgaccctgagacccccatcattgtggtgaagcagggacacgagccccccaccttcacaggctggttcctggcttgggatcccttcaagtggagtaacaccaaatcctatgaggacctgaaggcggagcttggcaactctagggactggagccagatcactgctgaggtcacaagccccaaagtggacgtgttcaatgctaacagcaacctcagttctgggcctctgcccatcttccccctggagcagctagtgaacaagcctgtagaggagctcccccgagggtgtggaccccagcaggaaggaggaacacctgtccattgaagatttcactcagg

SEQ ID NO: 288 - DNA, 465 bp, Homo sapiens
  misc_feature 40, 42, 337, 428, 461: n = A,T,C or G
caagctttttttttttttttttttttttgatttttagtananacggggtttcaccgtgttagccaggatggtctcgatctcctgacctcgtgatctgcccgcctcagcctcccaaagtactgggattacaggtgtgagccaccgcacccagcccattattattttttgagacaagtctcgctctgttgcccaggctggagtgcagtggcatgatcttggctcactgcaacctccacttcctgggttcaagcgattctcctgcctcagccacccgagtagctgggattacaggtgcgtaccaccacacccagctaactattttttgtatttttagtanagatgggatttcactgtgttagccaggatagtctcgatctcccgacctcatgatccgcctgcctcggcctcccaaagtgctgggattacangcgtgagccactgtactcggccaaagcttttanagaa

SEQ ID NO: 289 - DNA, 480 bp, Homo sapiens
gtgttcccagtgccacaccgttgaaaagggaggcaagcacaagactgggccaaatctccatggtctctttgggcggaagacaggtcaggcccctggatactcttacacagccgccaataagaacaaaggcatcatctggggagaggatacactgatggagtatttggagaatcccaagaagtacatccctggaacaaaaatgatctttgtcggcattaagaagaaggaagaaagggcagacttaatagcttatctcaaaaaagctactaatgagtaataattggaaatttccatatgatttattgttgttccttgtacataagaaacagtaatatacaacttacactgctttagaatgtaaaatggataaaaatgtgtacaaaaaaagcacattcctagaaaaaggtattggcaaatagtaaaaatgggaggtcaaaagcaaaaaaaaaaaaaaacaaaacaaaaaaaagaaaaaccaac

SEQ ID NO: 290 - DNA, 551 bp, Homo sapiens
aaatacaaaaggtgtcttgtgttgcttaatcatacagtttcgtacattttgtatagatattcctcactctacagtcacagatttggcaagattccgtgggaaatcaacatcatagcctctcagcacagcaaggtggaaagccagcaactgtaaagggatcacgctgagaatgccctgcaagcagtccactgagtggggcaccttgatcgttctttttgtgttcttaatggtctcagtatcctccttatcacaaattaccacaggccgcccctgccgagcaaccacttgctgaagagcattctgacacttggcataagtgtgatctctcatgatgatcatgatcacaggcatcaatttatccaccaaagccagagggccatgtttcaattcaccagcaaggatgccttcagagtgcatataagtaatttctttgattttcagtgccccttcaagacaagtagcataatgatagcctcgtcccattatcagaactgacttctgatgataaagttctgttgctagtttctgaatttcgtcatccatgctcagta

SEQ ID NO: 291 - DNA, 480 bp, Homo sapiens
aaattctttgtgcagagagtttcagcttcagatattcttcctgtgtctattagaccagtgacagcttgtgagagagaccacttttcaagggactggttgtaattttcaaagaatttttcgtctttaattgaagcagaaacagcagataacagtgccaagtataaatctatactctttggctgagtgttgttcactaaggccagtttatcatcagcgtgacaggctgccattagcccagcccagatagcaggatcacctggagaaaggagagctgccttctgaatggtctttagtgcagtattttttcatcttctgctgaactgcttcccatagccaactgatttaccgcagtgtacagtaatgccttctttccatgatttgagtccagaatatgggccacatttcctgctacaacacctccctttgcatttcgttgagcatactgtgcaacaactcgagacaacagagaccaaagagcag

SEQ ID NO: 292 - DNA, 294 bp, Homo sapiens
ccacaaagccattgtatgtagctttagctcagcgcaaagaagagcgccaggctcacctcactaaccagtatatgcagagaatggcaagtgtacgagctgttcccaaccctgtaatcaacccctaccagccagcacctccttcaggttacttcatggcagctatcccacagactcagaaccgtgctgcatactatcctcctagccaaattgctcaactaagaccaagtcctcgctggactgctcagggtgccagacctcatccattccaaaatatgcccggtgctatccgcccag

SEQ ID NO: 293 - DNA, 474 bp, Homo sapiens
ctgctgggcatgctgtgtgcttgcatcgtgttgtgcagaaggagtagagatcctgcttacgagctcctcatcactggcggaacctatgcatagttgacaactcaagcctgagctttttggtcttgttctgatttggaaggtgaattgagcaggtctgctgctgttggcctctggagttcatttagttaaagcacatgtacactggtgttggacagagcagcttggcttttcatgtgcccacctacttacctactacctgcgactttctttttccttgttctagctgactcttcatgcccctaagattttaagtacgatggtgaacgttctaatttcagaaccaattgcgagtcatgtagtgtggtagaattaaaggaggacacgagcctgcttctgttacctccaagtggtaacaggactgatgccgaaatgtcaccaggtcctttcagtcttcacagtggagaactcttggac

SEQ ID NO: 294 - DNA, 330 bp, Homo sapiens
tttgtgtattgcggcaagaaggcccagctcaacattggcaatgtgctccctgtgggcaccatgcctgagggtacaatcgtgtgctgcctggaggagaagcctggagaccgtggcaagctggcccgggcatcagggaactatgccaccgttatctcccacaaccctgagaccaagaagacccgtgtgaagctgccctccggctccaagaaggttatctcctcagccaacagagctgtggttggtgtggtggctggaggtggccgaattggcaaacccatcttgaaggctggccgggcgtaccacaaatataaggcaaagaggaactgctgg

SEQ ID NO: 295 - DNA, 255 bp, Homo sapiens
cctgacattcctgcctgaagcttggcgtccttgatggtctagggggcttccaaggtgatcgggcagtgtcagtcttcagccgctaagccgagaagatctgggaaggagtcagtcagagagccttgggccagagttccaggggctctgggagtggctgccaggtgagttgaacagtccgattttcagtggggtcccacacagatgggacgcggcttaggaggaatccggggctgcgggcattccttggcccagtgg

SEQ ID NO: 296 - DNA, 109 bp, Homo sapiens
  misc_feature 39, 57, 79, 96: n = A,T,C or G
ttgggcggatagcaccgggcatattttggaatggatgangtctggcaccctgagcantccaacgaggacttggtcttanttgagcaatttggctangaggatagtatgc

SEQ ID NO: 297 - DNA, 338 bp, Homo sapiens
ctgctgcctggtgtactcccagatcagcagggctccactcacatggacattcagggagcggataatgccctgttgaggaatttccacacaaacgtccaactgttggatcagatttgctggaattccctcacgttcatttcccaacaagagcagagatttctcaggaaagcaatattgggttaggtctaaacttttggcagtttgttccactccaatgatggtataaccttctgttttcttctgctgcagataatcaattagctgaggtggttttacctccactagaggaagccactgttctgcagagacactgaggtgctgaaactgtttgtcgctga

SEQ ID NO: 298 - DNA, 476 bp, Homo sapiens
aaaaaaacagaaaggggaggaggatgaccttaactacaaataatattccactgcaacattattgctgtaaaacttccaagctggctgttcttccagatgctctcttttgatggctgtagtggctgacagatttatatttacatgttcaaaacaattaatgcttccatttattcatagattctctgaggttcccgtagaaccacaccaccttctgtcatggcactttgtagtcgtttcatgagtggaggccgaaaccacaaccttgccattctgatgctccacaagtgcttctacatgatgctgagtccttataactcgcaacctgtgctagaactcacgggagggaaacaccgtccgccagccccgctctttcctggctacagataaaagctccaggttccgggggttccggttggtgaattctggggcgacagcttcattttccacagggtccacttcaggtttcgctgccggct

SEQ ID NO: 299 - DNA, 493 bp, Homo sapiens
  misc_feature 218: n = A,T,C or G
ctgtgaaggaaagaattgccaaattctttggaaaagatattagcacaacactcaatgcagatgaagcagtagccagaggatgtgcattacagtgttcatgaagtctttagtcgaaaccatgctgctcctttctccaaagttctcacctttctgagaagggggccttttgagctagaagctttctattctgatccccaaggagttccatatccagaagnaaaaataggccgctttgtagttcagaatgtttctgcacagaaagatggagaaaaatctagagtaaaagtcaaagtgcgagtcaacacccatggcattttcaccatctctacggcatctatggtggagaaagtcccaactgaggagaatgaaatgtcttctgaagctgacatggagtgtctgaatcagagaccaccagaaaacccagacactgataaaaatgtccagcaagacaacagtgaagctggaacacagccccaggtacaaactgatgctc

SEQ ID NO: 300 - DNA, 494 bp, Homo sapiens
  misc_feature 472: n = A,T,C or G
gagcggccgcccggcaggtctgccaaggagaccctgttatgctgtggggactggctggggcatggcaggcggctctggcttcccacccttctgttctgagatgggggtggtgggcagtatctcatctttgggttccacaatgctcacgtggtcaggcaggggcttcttagggccaatcttaccagttgggtcccagggcagcatgatcttcaccttgatgcccagcacaccctgtctgagcaacacgtggcgcacagcagtgtcaacgtagtagttaacagggtctccgctgtggatcatcaggccatccacaaacttcatggatttagccctctgtcctcggagtttcccagacaccacaacctcgcagcctttggccccactctccatgatgaaccgcagcacaccatagcaggccctccgcacagcaagccctcctaggagtttgtaacgcagagactctgcctgggcnatggcacacagacctctagtgg

SEQ ID NO: 301 - DNA, 450 bp, Homo sapiens
  misc_feature 432: n = A,T,C or G
tagagccggagctgccgcgccagtcgcctagcaggtcctctaccggcttattcctgtgccggatcttcatcggcacaggggccactgagacgtttctgcctccctctttcttcctccgctctttctcttccctctcgtttagtttgcctgggagcttgaaaggagaaagcacggggtcgccccaaaccccttctgcttctgcccatcacaagtgccactaccgccatgggcctcactatctcctccctcttctcccgactatttggcaagaagcagatgcgcattttgatggttggattggatgctgctggcaagacaaccattctgtataaactgaagttaggggagatagtcaccaccattcctaccattggttttaatgtggaaacagtagaatataagaacatttgtttcacagtatgggatgttggnggtcaagatagaattagg

SEQ ID NO: 302 - DNA, 234 bp, Homo sapiens
cctgaaggaagagctggcctacctgaagaagaaccatgaggaggaaatcagtacgctgaggggccaagtgggaggccaggtcagtgtggaggtggattccgctccgggcaccgatctcgccaagatcctgagtgacatgcgaagccaatatgaggtcatggccgagcagaaccggaaggatgctgaagcctggttcaccagccggactgaagaattgaaccgggaggtcgctgg

SEQ ID NO: 303 - DNA, 481 bp, Homo sapiens
  misc_feature 417, 461: n = A,T,C or G
gttgcttccttgaagatgggactccttgggtatcaagacctatgccacatcacactggggctagggaagtaggtgatgccagccctcaagtctgtcttcagccagggacttgagaagttatattgggcagtggctccaatctgtggaccagtatttcagctttccctgaagatcaggcagggtgccattcattgtctttctctcctagccccctcaggaaagaaggactatatttgtactgtaccctaggggttctggaagggaaaacatggaatcaggattctatagactgataggccctatccacaagggccatgactgggaaaaggtatgggagcagaaggagaattgggattttagggtgcagctacgctcaccctaaacttttggtggcctggggcatgtcttgaggcccanactgttaaccaggctctgctggcctgtttactcgtcaccacctntgcacctgctgtcttgagac

SEQ ID NO: 304 - DNA, 338 bp, Homo sapiens
aaagttctttatagggttagggtgtgggaaaatgctatattaataaatctgtagtgttttgtgtttatatgttcagaaccagagtagactggattgaaagatggactgggtctaatttatcatgactgatagatctggttaagttgtgtagtaaagcattagggtcattcctgtcacaaaagtgccactaaaacagcctcaggagaataaatgacttgcttttctaaatctcaggtttatctgggctctatcatatagacaggcttctgatagtttgcaactgtaagcagaaacctacatatagttaaaatcctggtctttcttggtaaacagatttt

SEQ ID NO: 305 - DNA, 446 bp, Homo sapiens
ggtcgtcccgctcctaaggcaggaagatggtggccgcaaagaagacgaaaaagtcgctggagtcgatcaactctaggctccaactcgttatgaaaagtgggaagtacgtcctggggtacaagcagactctgaagatgatcagacaaggcaaagcgaaattggtcattctcgctaacaactgcccagctttgaggaaatctgaaatagagtactatgctatgttggctaaaactggtgtccatcactacagtggcaataatattgaactgggcacagcatgcggaaaatactacagagtgtgcacactggctatcattgatccaggtgactctgacatcattagaagcatgccagaacagactggtgaaaagtaaaccttttcacctacaaaatttcacctgcaaaccttaaacctgcaaaattttcctttaataaaatttgcttgt

SEQ ID NO: 306 - DNA, 267 bp, Homo sapiens
  misc_feature 193, 213, 214, 219, 244: n = A,T,C or G
ctgcagccgctgcagctactcctgctgtccgcaccgttccacagtataaatatgctgcaggagttcgcaatcctcagcaacatcttaatgcacagccacaagttacaatgcaacagcctgctgttcatgtacaaggtcaggaacctttgactgcttccatgttggcatctgcccctcctcaagagcaaaagcnaatgttgggtgaacggctgnnccctnttattaagccatgcaccctactctngctggtaaaatcactggcatgtt

SEQ ID NO: 307 - DNA, 219 bp, Homo sapiens
aaaaatctaatctgccagtttagcgttttccaccaactcggggagctgaaactttcacaggcttcacaatcttttgcttaggtgctgcctttgtaggtgccttagcagcagccattgcagtctttttagatgcttgcttagccttttttgcttccttagcagccctgatagcttgttctcgttgagcctttctaacttcaggtttctgattcctcttgg

SEQ ID NO: 308 - DNA, 374 bp, Homo sapiens
ccacaaatggcgtggtccatgtcatcaccaatgttctgcagcctccagccaacagacctcaggaaagaggggatgaacttgcagactctgcgcttgagatcttcaaacaagcatcagcgttttccagggcttcccagaggtctgtgcgactagcccctgtctatcaaaagttattagagaggatgaagcattagcttgaagcactacaggaggaatgtaccacggcagctctccgccaatttctctcagatttccacagagactgtttgaatgttttcaaaaccaagtatcacactttaatgtacatgggccgcaccataatgagatgtgagccttgtgcatgtgggggaggagggagaagagatgtacttttt

SEQ ID NO: 309 - DNA, 496 bp, Homo sapiens
  misc_feature 402: n = A,T,C or G
aaattgcatttttacaagttgttttttaattagtgttctatttacattgcagaacttccaccaactgcagtagtttaactttggcacaacattaagttccatttcttttgggtattggatcctgctttttgagtgtgtatgccccaaaacgttttcaatgtcatcaaagattgggcaaattcacagtaaatcagacatcttgagttgaagaattgattctccttcaacgttttaggcagatttcagtcatctgatttagacagcttccgtttcacatgtcgtggaggttcccaagtgtcactatcatctgtttcttcttcatcctcttcctggtcatcaataacttcatcttcctcctcattttcctcaaataattctatacctaattctgatcttctctgnctttctgcaaaccactctctgacctgctcatagcccatatgtgatttgttaacaagttcatcaaggtcttgctcattaagaaacttgtgcttca

SEQ ID NO: 310 - DNA, 245 bp, Homo sapiens
tcggaagtgagcaaaactgccgcaagtctgcagcccggcgccaccatcctgcagcctcctcctgaccacggacgtttccatcaggttccatcccgaaaatctctcggttccacgtccccctggggcttctcctgacccagtccccgtgccccgcctccccgaaacaggccactctcctcggccccctccatcgggctgaggaagcacagcagcatcttcaaacatgtacaaaatcgattggcttt

SEQ ID NO: 311 - DNA, 294 bp, Homo sapiens
ctgtagccaaaaagatgctggggcagattgtggacaagtagaagcacctccttcccctctgcgacattgaacggcgtggattcaatagtgagcttggcagtggtgggcgggttccagaaggttagaagtgaggctgtgagcaggagcctctgccaggggatgcaccatctgtggggaggggccgagggagactccatggtctctgctgtctgctctgtcctcctctgtggagaagagcttgagttccaggaacgttttgtcaaggctgctgtgactgtctggtctgctgtcgta

SEQ ID NO: 312 - DNA, 522 bp, Homo sapiens
  misc_feature 394: n = A,T,C or G
tgagcggccgcccggcaggtaaaaaaaaaaaaaaaaaaaaaaaaaaaaaagcttgtacaaaacgagggcgaaggtaccgaaagcacagtaatcactggtgtcgatattgtcatgaaccatcacctgcaggaaacaagtttcacaaaagaagcctacaagaagtacatcaaagattacatgaaatcaatcaaagggaaacttgaagaacagagaccagaaagagtaaaaccttttatgacaggggctgcagaacaaatcaagcacatccttgctaatttcaaaaactaccagttctttattggtgaaaacatgaatccagatggcatggttgctctattggactaccgtgaggatggtgtgaccccatatatgattttctttaaggatggtttanaaatggaaaaatgttaacaaatgtggcaattattttggatctatcacctgtcatcataactggcttctgcttgtcatccacacaacaccaggacttaagacaaatgggactgatgtcatcttgagctc

SEQ ID NO: 313 - DNA, 517 bp, Homo sapiens
aaagaaagaaagaaagtgggggaggccaggggggcaagggacagaacatgggggagaaacaaaggtggtcagttggggaggggagctcctgggctctccctggctgccctggggtggggctgagcctcagttggagtcagagtctgaggagtcccctgaggaggaggagctggagctgctgccctcggactcattatcttcatcctcatcgtcatcctcgtcgtcgtcttcgtcctcgtcatcctcttcattctcatccccatcctcgctctcgtcctcgccgctggactcagaggagtcgccgccatcttcagaggagtccccattctcatcatcttcctcttcttcatcctcgtcctcgtcatcctcatcctcttcatcatcctcctcggactccgacttggactgcagagtagtccggctggatttggggtttgggcctcgcagcttggtcatgctcttacgtttattggagatgtactctttatatgctgcacggtcctggggagacaggctc

SEQ ID NO: 314 - DNA, 486 bp, Homo sapiens
  misc_feature 287: n = A,T,C or G
aaatgttttaggcaacctaagaacaaatgtaaaagtaaagatgcaggaaaaatgaattgcttggtattcattacttcatgtatatcaagcacagcagtaaaacaaaaacccatgtatttaacttttttttaggatttttgcttttgtgatttttttttttttttttgatacttgcctaacatgcatgtgctgtaaaaatagttaacagggaaataacttgagatgatggctagctttgtttaatgtcttatgaaattttcatgaacaatccaagcataattgttaanaacacgtgtattaaattcatgtaagtggaataaaagttttatgaatggacttttcaactactttctctacagcttttcatgtaaattagtcttggttctgaaacttctctaaaggaaattgtacattttttgaaatttattccttattccctcttggcagctaatgggctcttaccaagtttaaacacaaaatttatca

SEQ ID NO: 315 - DNA, 122 bp, Homo sapiens
ccactgcaggggatggcctgatcgagctgcgcaagctggaagctgcagaggacatcgcgtaccagctctcacgctctcggaacatcacctacctgccagcggggcagtccgtgctcctccag

SEQ ID NO: 316 - DNA, 442 bp, Homo sapiens
aaattccctgttaagttcccctccataatttttatgttcttgtgaggaaaaaagtaaaacatgtttaattttatttgactttcgcattgcttttcaacaagcaaatgttaaatgtgttaggacttgtactagtgttgtaactttccaagtaaaagtatcccctaaaggccacttcctatctgatttttcccagcaaatgaggcaggcaattctaagatcttccacaaaacatctagccatctaaaatggagagatgaatcattctacctatacaaacaagctagctattagagggtggttggggtatgctactcataagatttcagggtgtcttccaactgaaatctcaatgttctcagtacgaaaaacctgaaatcacatgcctatgtaaggaaagtgctattcacccagtaaacccaaaaaagcaaatggataatgctgg

SEQ ID NO: 317 - DNA, 484 bp, Homo sapiens
ctggcatgaagaaggaatagagcatggacacgccctgggacagcatggtgatctctaatttgtgctctgtcttaaaatagtcgaggaactgtttgagggtcatctcctcaccattaggctgcagcccttgtacctcaaagcgatcccacaatgtccactcttggttatagtactggtgacgtggtgcggcaaggggttcagagaaaccaaagaaaggcagggccaagttgaggaaaccattcttgtaggagtcaagctgtcggtgcccctgcacaaccttgtacagctccagacacacaaggccaaccacggctgctgtggtcgtggcaatggctgggatgatcttccctgcaatcagcttgctcttgtgccggtctgcagaaggaatgtcatagttttctgcccggaggttggatgcagccacgatgaaatccatatgaaagttgctgtcatcatccttctcaaagtcaatggggtacatctt

SEQ ID NO: 318 - DNA, 395 bp, Homo sapiens
  misc_feature 298: n = A,T,C or G
ccagggtgcttttggaaacatgtgtcgtggaggccgaatgtttgcaccaaccaaaacctggcgccgttggcatcgtagagtgaacacaacccaaaaacgatacgccatctgttctgccctggctgcctcagccctaccagcactggtcatgtctaaaggtcatcgtattgaggaagttcctgaacttcctttggtagttgaagataaagttgaaggctacaagaagaccaaggaagctgttttgctccttaagaaacttaaagcctggaatgatatcaaaaaggtctatgcctctcancgaatgagagctggcaaaggcaaaatgagaaaccgtcgccgtatccagcgcaggggcccgtgcatcatctataatgaggataatggtatcatcaagg

SEQ ID NO: 319 - DNA, 458 bp, Homo sapiens
ctgtgatggcttggagaaacagtgtaaaccggcagtgtaaacaagagcagggcatgtatgagtagttgagaacggtgaataggagtatgactagacagaagatagtagggatgacaagttttttggggcacagtctaagttggtcgggtgtctggaatgagaatgggacctaataaaaagaagcgtctatacaggagcttaaatgggctgtaccttgtagcattctgaggacaggtctgacttctgaggagggaaagtggtaaaagtattgtccagtcctttttaagttggtggctgagcttgttgaggtgtgtttttaatagaccattagtctgtcactgaatactaagagcctgaaaaactgcttggctgatttgactaataaaggctggtctgttatcagactgtatagaggtgggaaggctaaactgaggaattatgtctgacagaagggaaga

SEQ ID NO: 320 - DNA, 498 bp, Homo sapiens
aaacatgatagtccataaccattttgaaatgctgggcaaactacatgaagttatttataattaattcacagctaatcaggcattttgaaagcttaattggattcaaaaaccataatgttggaatttggtaaaattttaatgttgatttttactgtgaaaaggtttttataagatatacacaccctagtttaatgttgtgtcttggtgtggatttacagatttactacaggtattctgaaccaggaacacaatcaggtttcaggccagtttgatactggctgtccttaattctaatatgagagtaggacatcatactaaatgttatgtcagtgggactgtactgtctgtggaacttagcaaattaatcattttcttcagacttgaaggagagtgataaataaaatttggagtcataggatattgatgcacaatttaaggattaaacatttttaatcaattgtggatgatggcttattaaatgttgacttcctagtataa

SEQ ID NO: 321 - DNA, 283 bp, Homo sapiens
ccacagcctgagtgacgaatttcctactgaatgtaccaagttccaatttttaagggggggaaaggtttcaaatggggaaaaacacacaaaaaaaaatcactaaaaattcccacaaatcttgtttctggcactttagaaaaactgcaaaaaaatacgtaataaagaatacatatatatatatctacacacaaattatatatctatctatctatacagcggaaccacaagagagactgaggaaggatttttttcaatgtccttttccaaaagtggcagtaagcag

SEQ ID NO: 322 - DNA, 240 bp, Homo sapiens
ctgtcaccttggacttgttggagatgcaggggctagaaaggaaatgacagagtgtacaggccccttcgaccccgtgtcccataggtggtggcccccagacacaccctctctgctggcagtgcagaacatgcatcccaataccctagaggagaaacaccaccccagggagagccctttctgctccaacctcctgggcaggtcccaggttggggcagcagccatctgcaggtgtttgtcagg

SEQ ID NO: 323 - DNA, 317 bp, Homo sapiens
  misc_feature 58, 173, 175, 244, 264, 301, 304, 305, 306, 314: n = A,T,C or G
ccaattcttcttctcccccccacccaaagacatgtgagcaactgctaatgaaaagcantaaacagccgcttaggctatagcagtttcaacttcactctgaggtgaagattccaattacattcgagacttaagttctttcaattttttcctaacaaaagttcctgagtccagtntntacaatattacagcactagcagatcagtgtctacaactcatctttttctgctgtatcctcttcaccagntgggggagggcctgcacttncatagagtttgctgataattggttgaacaatttcttncannnccttcttntta

SEQ ID NO: 324 - DNA, 478 bp, Homo sapiens
  misc_feature 394: n = A,T,C or G
ctgttcttaggggtcactgagcgtctacctcctcctccagaggaggctggctcagaacgcctagaggagggggccggggatgcaccccccaccagaggctgccttcagcgtctcacgggtgcaggacagcgctcaggcttgggctctaagctctgtgtctagtgtagaacatggggaaggagcatcttaggaactgctgaagtaacttcttactgctctcacaattctaaggaagcgggagaacggcctcctaccaacagcgcccaccccagagctgcctgggaaagggcagttttactgaaaggtgctttactgttcacctgcatctttcagcagctcccctcctgccctcacctggtcttttccctctttatcccaagcctttatgcttgantcccttccccaggggctgcccacccgacagttccaggcattccctacctgagcttcttgtctgcttttccttctcccactgcaa

SEQ ID NO: 325 - DNA, 141 bp, Homo sapiens
ggaagggctgggggcctgaataatccctgaggagtagtagaatagcagatggaacactgagaagttatttccttgaggatagatttccacgatggaaaggaaatgagaggttctgagaggcgggatagtggcttgtactat

SEQ ID NO: 326 - DNA, 439 bp, Homo sapiens
aaacaaagcagtgcagttcttagccaagggtaagtactgcaactgtcgagagcatcttgtcttccacacagttgggtgactctccgttttgacacaaagataagccttgcccttgtttccttttgggagggatatatccactgagatgagaggccaaactccgtttttcacgagattttttgactttgagcttcattttcttcttgtcaggatcatgtacaacagcatgcctagtgagactttgtttcattgcaaatgttttgccacagccagcatgttcacacacaaaagggcggctttcctcatggaaggagaggatatggctttggagattaaacacagttgtataggttcttccacagccttctcttggacagcgacatacatccctttctggggcatgagttttcatgtgttgcttaaggtaatctttgcgttt

SEQ ID NO: 327 - DNA, 538 bp, Homo sapiens
aaagatcaatttccccagagggtgtgcaatgcatcataaaatggcccttttttgaggatgggagaggaagggttgggcaggatggaatattaaattgtaacatgataaacatgcaagactgttatccaatctagataatttatatacattttgatgacttaggaaaacaaagcaatcatttgtgacaagcctaaaaagcttgacatatttaacatacttaggaactttttttgtgcggtgggaattctctaattgtatcatgtgggccttttgaaagtaacaaacagaaggccagtctgttgcaagtttgctgctgaacatcacattccaccctaagaaaacacaaggtggattgcatcgagggtggataccttaccttagcacagaaggaaaaagtatgtcagtgcaaagtatggactaaactgctttcaggaaaaaagttgtaaaaattgatacaggttggaaaagggaattttccttcccggcttggagtcctcccaatttaaggcagaacccatccactccaatttctgcagtt

SEQ ID NO: 328 - DNA, 374 bp, Homo sapiens
ctggctcttacctcctggctttctctcctacaaacacacccattccttgggggcttgtaacacagtgcgaggtgggtcaccaacaggcatcagactggtgtagtcatcagcgggtagctggtaggcttggaagacgctgagcagatccttcataccagccgtgtatgggacaccctgcatgcggaccaaggctcctgactgggacaacactgaggtgggagcagaggccagggcagcagtgggtgtagtgaggtagcccacagtggtgggggagactggggggcttgggtagtaggctgtgtagttcaggtagagttgagtggctggccctggatagtaggcaacaggggtgggggcagcaggcaccctggcag

SEQ ID NO: 329 - DNA, 270 bp, Homo sapiens
ccaggtagaggcccaggagcagggccagcacctccatcaccacccacaccagcgctgtgcttgcacacaggcccagcacctccgggaagaaccttttctgaatgcccagtgccatcccagccaggagcacgtaagtaatgaaggccatcgtggggatatagaggtcaggggcgttgaggtcttgccgggggggcagaggagcatcacgactgtactgcacttcccagttctggtgtgtgtaggggaagaccagcagccctagcttcttgg

SEQ ID NO: 330 - DNA, 402 bp, Homo sapiens
aaaataagcacaccaagttatatgactaatataacttgaaaattttttatactgaggggttggtgataactcttgaggatgtaatgcattaataaaaatcaactcatcattttctacttgttttcaatgtgttggaaactgtaaaatgatactgtagaacctgtctcctactttgaaaactgaatgtcagggctgagtgaatcaaagtgtctagacatatttgcatagaggccaaggtattctattctaataactgcttactcaacactaccaccttttccttatactgtatatgattatggcctacaatgttgtatttgttatttattaaattgtgattgttttattattgtttatgccaaatgttaactgccaagcttggagtgacctaaagcatttttt

SEQ ID NO: 331 - DNA, 351 bp, Homo sapiens
ctgggaaattgagtttttgactgaaacatggagccttcactgctttttttctggttcctatgaagatttggaacatagaaaacacaaaaactcaccttaaaatttgagcaggtcgttgatggcaaaaataattttaaggaaaaaggaatattcttatgtagttattctaaagtttaaggagcgttgttgaccataatattgcttagttttcttactgctgttaagtaagtaaattgtttcaaagtaggttttgtgtgtgtgtgcctagtgtaaaagaactgaaattttgatgcttacagcacttggctcgtgcatttgtatcaaaatttgcctgcctctttatgagggagg

SEQ ID NO: 332 - DNA, 511 bp, Homo sapiens
  misc_feature 92, 472, 473: n = A,T,C or G
cctatgttttgaacgagaccaatctgttggagaccctaaaattgacttaattagaacattaaatattcctgtattgactgtcatagagtggncccaggtgcacttcctcagggagatcatcgaggccatgttgaaagcctatcagcagaagctctttgtgactcacacagttgacgaattgctctggggctacaaagatgaaatcttgtcccttatccatgttttcaggcccgatatctctccctattttggcctattctatgagaaaaatgggactaatgatggagactatgtttttctaactggagaagacagttaccttaactttacaaaaattgtggaatggaatgggaaaacgtcacttgactggtggataacagacaagtgcaatatgattaatggaacagatggagattcttttcacccactaataaccaaagatgaggtcctttatgtcttcccatctgacttnngcaggtcagtgtatattactttcagtgactatgagagt

SEQ ID NO: 333 - DNA, 342 bp, Homo sapiens
ctggcggtgctcggcgcggcgctggcggccgcagccctcgtactgatttccatcgttgcatttacaactgctacaaaaatgccagcactccatcgacatgaagaagagaaattcttcttaaatgccaaaggccagaaagaaactttacccagcatatgggactcacctaccaaacaactttctgtcgttgtgccttcatacaatgaagaaaaacggttgcctgtgatgatggatgaagctctgagctatctagagaagagacagaaacgagatcctgcgttcacttatgaagtgatagtagttgatgatggcagtaaagatcagacctcaaaggtagctttt

SEQ ID NO: 334 - DNA, 280 bp, Homo sapiens
cgcagaagcgagatgacgaagggaacgtcatcgtttggaaagcgtcgcaataagacgcacacgttgtgccgccgctgtggctctaaggcctaccaccttcagaagtcgacctgtggcaaatgtggctaccctgccaagcgcaagagaaagtataactggagtgccaaggctaaaagacgaaataccaccggaactggtcgaatgaggcacctaaaaattgtataccgcagattcaggcatggattccgtgaaggaacaacacctaaacccaagagggcag

SEQ ID NO: 335 - DNA, 447 bp, Homo sapiens
tccgggaagatggcggccgtgcaggcggccgaggtgaaagtggatggcagcgagccgaaactgagcaagaagtggtggtaatcattagttccagggtgctctgccatgttgacgcaagctgctgtaaggcttgttagggggtccctgcgcaaaacctcctgggcagagtggggtcacagggaactgcgactgggtcaacttgctcctttcacagcgcctcacaaggacaagtcattttctgatcaaagaagtgagctgaagagacgcctgaaagctgagaagaaagtagcagagaaggagaccaaacagaaagagctcagtgagaaacagctaagccaagccactgctgctgccaccaaccacaccactgataatggtgtgggtcctgaggaagagagcgtggacccaaatcaatactacaaaatccgcagtcaagcaattcatcag

SEQ ID NO: 336 - DNA, 196 bp, Homo sapiens
  misc_feature 119, 170, 183: n = A,T,C or G
aaaaaaaagacatttattcagcgtcacgatcagactgttacatttagcaatcaacagcatggggtgcaaaaaaaaaaaaatctacattaaaaccctttgttggaatgctttacactttncacagaacagaaactaaaataacctgttatacaattagtcacaaatacagncctcgagtttttngcccatacacatg

SEQ ID NO: 337 - DNA, 419 bp, Homo sapiens
ctgacgcgtcatttcagcatttttccagccttttttgaagctctctaggaagccttcccgtggaggtaatttgtccaggtcatgtacaacacgctgggggattttaagtacagtgcgtactgctggaatccggagacaggatacttggaccagggaaaacagattggaggagagccagtacataaacactgccgtggggaaatgcatggttatgggcaaggttatcaggggcatcattctgatgacatttctcatccactgaaggtcagaactttgcacacctgtctcagcacctagctcaagaacagcccacattgtagcagtgactgccagtggtaatatgtagatgggatcggataccgtgagatcctggaaccaccagaggccacctgtctgcaggctgggcacaggaaggttgg

SEQ ID NO: 338 - DNA, 491 bp, Homo sapiens
aaatgcaaatttttacattaaaatatgtttataaatcatagtagttgttttccctcttgattcaacatttctccctcccctaacaggagccctagaacctgaagagcatgtacattactaacgagatatacaatccagccaccctgtccaaactggaatctgattactaatggactacactcgaggctgcccccaagggatgggaagcagtaactacgctctcagggagaatgggtactgaggatgccaccagtcaaagagccgaacgctgtgcactgggtccaggatgacttgcacaccctgttcactgcgcagtttccgaccaccatggacaggggaatcttggaacaccagtctcactcgatgatgccgcatgtccgtgctcacattgatagtaaacagagtaaatatcattcccatgacaatcggaataaagatgaaattgagggtggtgacctgcagtaggcagcagtcctggtctggattggtat

SEQ ID NO: 339 - DNA, 323 bp, Homo sapiens
ccatacagggctgttgcccaggccctagaggtcattcctcgtaccctgatccagaactgtggggccagcgccatccgtctacttacctcccttcgggccaagcacacccaggagaactgtgagacctggggtgtaaatggtgagacgggtactttggtggacatgaaggaactgggcatatgggagccattggctgtgaagctgcagacttataagacagcagtggagacggcagttctgctactgcgaattgatgacatcgtttcaggccacaaaaagaaaggcgatgaccagagccggcaaggcggggctcctgatgctgg

SEQ ID NO: 340 - DNA, 512 bp, Homo sapiens
gctccccctactgcctatatcgacttcgcccggcagaagctagatcccaagattgctgtggctgcgcagaactgctacaaagtgactaatggggcttttactggggagatcagccctggcatgatcaaagactgcggagccacgtgggtggtcctggggcactcagagagaaggcatgtctttggggagtcagatgagctgattgggcagaaagtggcccatgctctggcagagggactcggagtaatcgcctgcattggggagaagctagatgaaagggaagctggcatcactgagaaggttgttttcgagcagacaaaggtcatcgcagataacgtgaaggactggagcaaggtcgtcctggcctatgagcctgtgtgggccattggtactggcaagactgcaacaccccaacaggcccaggaagtacacgagaagctccgaggatggctgaagtccaacgtctctgatgcggtggctcagagcacccgtatcatttatggaggctctgt

SEQ ID NO: 341 - DNA, 463 bp, Homo sapiens
ctggtagggagcaattctattatttggcattgcatggctgggttgaattaaaacagggagtgagaacaggtgagtctagaagtccaactctgaaaaggaccactgtacatttgaacacacggctgtgttaaagatgctgctaatgtcagtcactgggtgcactaaaggatctcttattttatgtaaaacgttgggattgacaagatagatctgatactctgttaagttaccctctgaagctacttcttgtgaaatactaatgacagcatcatcctgccaagcgaaagaggcaggcataagcaaggacaaattaaaagggggtaagagccttatcatgatgaggagtcttgttttgacatcttgggaaaagctgtccatagtgtgaagtcgtcaatttctcaccatggtttgcagtttgcctgtctctagttaggtgaagtctctgagtggcacacacctcagg

SEQ ID NO: 342 - DNA, 419 bp, Homo sapiens
cctagttggatgcgggtcggtcctgcccaaggccccagtgaggggagccgaggctaggaaggggcaagttttatgtgtttgggagggggtgtctcttcccggcctctgcgtcttccccctggagcgtcagtatggtcgggctctggtgacccagccgctttgcctcccgactttgggaagagtagcaaggagaggtcctggcaagtacaccctgggtgacaaacggctatgagagttcccaggtgatttctcgagcagcttcagtttaccggagcccagccaggagagagaattttagcacaggaaacgcaatcccgtgtccaagctcctagaatacccaggactgagaaccaaagcaacagacttttcccagggagccacactgcctccccacctcttctttaacccctcacttggca

SEQ ID NO: 343 - DNA, 390 bp, Homo sapiens
ccttggtgtcttcacatacattctctgagccaacatctatccagcagccctgacctcctgctataatttaagtctatttccttttaatctaataagagttgatagtaaaaaggcaggtgatggaaatcagtgtataaatcacaatggagtatattggcaactccacagcttatagtttgataaaggcaaatacatgaaaaataaaaatgctactaatgccccaaggtgtctatcaaaatgatgtagggggtatcttaaactgtccaaggcaatcatgcattgaactttattcctatgcagagccaaaacgaatagtgttgataaaatagctaaactttctaaactggagaggaggctacagtgccagagagttattgtctcttttgcttt

SEQ ID NO: 344 - DNA, 531 bp, Homo sapiens
ctgaagaaatcgaaaggatggttaatgatgctgagaagtttgctgaggaagacaaaaagctcaaggagcgcattgatactagaaatgagttggaaagctatgcctattctctaaagaatcagattggagataaagaaaagctgggaggtaaactttcctctgaagataaggagaccatggaaaaagctgtagaagaaaagattgaatggctggaaagccaccaagatgctgacattgaagacttcaaagctaagaagaaggaactggaagaaattgttcaaccaattatcagcaaactctatggaagtgcaggccctcccccaactggtgaagaggatacagcagaaaaagatgagttgtagacactgatctgctagtgctgtaatattgtaaatactggactcaggaacttttgttaggaaaaaattgaaagaacttaagtctcgaatgtaattggaatcttcacctcagagtggagttgaaactgctatagcctaagcggctgtttactgcttttcattagcagttgct

SEQ ID NO: 345 - DNA, 222 bp, Homo sapiens
ccatcatagaagcattaaggaaggagaggaatacatagatttgagatctatttgtaagtagaactaatgcatcttgctgagtgttgtatctgtaagactacaggaaggacgggaatcaaaaatggtttctgctggacgcggtggctcatgcctgtaatcccagcactttgggaggccgaggtgggcggatcacctgaggtcaggagtttgagagtagcctgg

SEQ ID NO: 346 - DNA, 516 bp, Homo sapiens
ctggggccactgtcggcatcatgattggagtgctggttggggttgctctgatatagcagccctggtgtagtttcttcatttcaggaagactgacagttgttttgcttcttccttaaagcatttgcaacagctacagtctaaaattgcttctttaccaaggatatttacagaaaagactctgaccagagatcgagaccatcctagccaacatcgtgaaaccccatctctactaaaaatacaaaaatgagctgggcttggtggcgcgcacctgtagtcccagttactcgggaggctgaggcaggagaatcgcttgaacccgggaggtggagattgcagtgagcccagatcgcaccactgcactccagtctggcaacagagcaagactccatctcaaaaagaaaagaaaagaagactctgacctgtactcttgaatacaagtttctgataccactgcactgtctgagaatttccaaaactttaatgaactaactgacagcttcatgaaactgtccacca

SEQ ID NO: 347 - DNA, 185 bp, Homo sapiens
aaaccaaattctaaccagcctatccccaggtagggggacgttggttatattctgttagagggggacggtcgtattttcctccctacccgccaagtcatcctttctactgcttttgaggccctccctcagctctctgtgggtaggggttacaattcacattccttattctgagaatttggccccag

SEQ ID NO: 348 - DNA, 293 bp, Homo sapiens
cttgaggctttcaggggttgtgacatcaaggctcaacctgtggatcagcaggacccaggaatctggagatcaggacccccaggaggcacagaaagcatcatctgcaaccgagaggactcagtggggacagaaatctgactcctcgctggacgctgaggtgtgacaagccccgccaagacagacctgcaagtcttcgtctcaagggacctccctcatgccaggcccctgcctctcacagcagcaccctttcctctcattgtccctgttccctttttgcctgtggatctgtttgg

SEQ ID NO: 349 - DNA, 567 bp, Homo sapiens
  misc_feature 563: n = A,T,C or G
ccaccatcatttaatgacattcaattaaggatttcttgaacaatttctaccaaaaaaataatttcctcctctaaaacattgataaaattgataactgggtacctaacagttgcaaaacatgtctacaccattctttagtatgaaaagcaacataaaaaaatggagcatcaaaatattttatttcaaatttattttatgccagatccaagctgtaactggaacctattcccagtctatgggtttctgaatttcattttcctatttattgtatttttatgagaaacttgttgtaatgagtctgtaccactttatttgacatttactaaagctgtataaaagccgtgcacagtttatttacagtattgtacattaaatgataatgtttgaagatcacacaaagatttcacaaaactataactaatacagaaagatgtgtgaaaacattaggggctttcaaaattttaggtatggaattttgcaaagattattttggcttataagtgttaggcaatcactaacctgaaataagtgacaaaaacatgcagatgattaccatttcaacnaatg

SEQ ID NO: 350 - DNA, 528 bp, Homo sapiens
cagagatcacgccactgcactccagcctgggcaacaagagtgaaactccgtttcaaaaaaaaaaaagaaattagacgttaaaaaaagatgtgacacatcatatcaaaattgtctacactacattaaaggagttaaaaatactgaaatgtagcaagacgaacttgtctcgagacagggtcttgctctgttgcccaggctggggtgcagtggcgccattatggctcactgcagtctcgacatcccgttctcacgcaatcctcctgcctctgcctcttgagtagctaggcctacagctatgtgccactacgcccagctaattttttgtatagatgaggttttgccttttttcctttctgtagagatgaggttttgccatgttcgccaggctggtctcgaactcctgacctcaagtaacccgcccacctcagcctcccaaagtgctgggataacaggtgtgagccaccaccacgcacagccaaaaatgccttttttttttttttgagacggagtctcgctctgtcatccagt

SEQ ID NO: 351 - DNA, 387 bp, Homo sapiens
  misc_feature 192: n = A,T,C or G
tttttttttttttttctggctctagagggggtagagggggtgttatagggtaaatacgggccctatttcaaagatttttaggggaattaattctaggacgatgggcatgaaactgtggtttgctccacagatttcagagcattgaccgtagtatacccccggtcgtgtagcggtgaaagtggtttggtttanacgtccgggaattgcatctgtttttaagcctaatgtggggacagctcatgagtgcaagacgtcttgtgatgtaattattatacgaatgggggcttcaatcgggagtactactcgattgtcaacgtcaaggagtcgcaggtcgcctggttctaggaataatgggggaagtatgtaggagttgaagattagtccgcc

SEQ ID NO: 352 - DNA, 471 bp, Homo sapiens
  misc_feature 465: n = A,T,C or G
aaacaatttgttaaaaaattttccgtcttatttcatttctgtaacagttgatatctggctgtcctttttataatgcagagtgagaactttccctaccgtgtttgataaatgttgtccaggttctattgccaagaatgtgttgtccaaaatgccgtttagtttttccttatttctcttgtcctttcgtacagggaggaatttgaagtagatagaaaccgacctggattactccggtctgaactcagatcacgtaggactttaatcgttgaacaaacgaacctttaatagcggctgcaccattgggatgtcctgatccaacatcgaggtcgtaaaccctattgttgatatggactctagaataggattgcgctgttatccctagggtaacttgttccgttggtcaagttattggatcaattgagtatagtagttcgctttgactggtgaagtcttagcatgtactgntcggag

SEQ ID NO: 353 - DNA, 309 bp, Homo sapiens
ctgaagatgatgaggatgacgatgtcgataccaagaagcagaaggccgacgaggatgactagacagcaaaaaaggaaaagttaaactaaaaaaaaaaggccgccgtgacctattcaccctccacttcccgtctcagaatctaaacgtggtcaccttcgagtagagaggcccgcccgcccaccgtgggcagtgccacccgcagatgacacgcgctctccaccacccaacccaaaccatgagaatttgcaacaggggaggaaaaaagaaccaaaacttccaaggccctgctttttttcttaaaagtacttt

SEQ ID NO: 354 - DNA, 321 bp, Homo sapiens
cggccgaggtctgttcagtatggcaaagggcagacttactccttcatccactctgctgccttgatgaggtgaacacactggaataagatggagggcaggatacctgccaaagcttgaggaatgagatgatctgaaacaattgggcaaaggctggacatttcaaaaagctgacttccaactgcagtttatgggtatagaatttgatgcttccctcaagtcctgactgctctttctgaggcagccaggctaggccaagaaatgagctgctccagcttctccagagcacagcagcctcccagggcctgtcagcatctgcagcag

SEQ ID NO: 355 - DNA, 357 bp, Homo sapiens
ccaaacttgcatttgcattttgcactcatgacgatgatgatgcccatggcgcacagaaccccagcgcagatgagcccgccaacctggaggctgtgccagtcatagtagaaaggactgtttttatcttctaggtcattggcgtccaggacaggaaagcctgccaggaacacaagcaggcccagggtcaccttctgcatgtcagagcgctggcctcttaagcctctttccaggggctcctccaagccacctctggcctgcaaggccccactatacccccttcccatgatgtcatccagccaagactgacagatggtatcctcctcgccccagcctctgtgtggttcaccaggctgagca

SEQ ID NO: 356 - DNA, 491 bp, Homo sapiens
  misc_feature 405, 406: n = A,T,C or G
cgccgccgcttgtgctgcagccatgtctctagtgatccctgaaaagttccagcatattttgcgagtactcaacaccaacatcgatgggcggcggaaaatagcctttgccatcactgccattaagggtgtgggccgaagatatgctcatgtggtgttgaggaaagcagacattgacctcaccaagagggcgggagaactcactgaggatgaggtggaacgtgtgatcaccattatgcagaatccacgccagtacaagatcccagactggttcttgaacagacagaaggatgtaaaggatggaaaatacagccaggtcctagccaatggtctggacaacaagctccgtgaagacctggagcgactgaagaagattcgggcccatagagggctgcgtcacttctgggnnccttcgtgtccgaggccagcacaccaagaccactggccgccgtggccgcaccgtgggtgtgtccaagaagaaataagtctgtagg

SEQ ID NO: 357 - DNA, 237 bp, Homo sapiens
ctgttgctgttattacagtccagcttagaagacaatacgtcaggaaatatgaaggagaagctgaggaacgaaagaaacttcgacaagagaatggaaatgtacatgctatagcataactgaagataaaattacaggatatcacattggagtcactgccaagtcatagtcataaatgatgagtcggtcctctttccagtggatcataagacaatggaccctttttgttatgatggtttt

SEQ ID NO: 358 - DNA, 434 bp, Homo sapiens
ctggggagggcagcaatctagcacgtttaccaggctcacagatggctctagcttgaatttgcgtgtgatggcacttagaacgcgtagctgggaggcccggtcctcatttgcccccacaaacaccagcttgtcaaatctgccaggccgcagaagggcagggtccaggagatctggtctgttggtggctccaatcacaaacacatcctgagtgctgtgcagcccatctagctcggcaaggagctgagacaccaccctgtccatcactcctccagaatctccacttcgcccccggcttggggccaaagagtccagttcatcaaagaagataatgcatggagctgcagccctggccctggcaaacacttcccgcacattctcctcactttggcccacatacatgttaatgagctctggccccttcacgctgaggaagg

SEQ ID NO: 359 - DNA, 219 bp, Homo sapiens; identical to SEQ ID NO: 307

SEQ ID NO: 360 - DNA, 361 bp, Homo sapiens
aaaatcctggataattatatacttaaagctcatgagcataaagctcacttgaccatgcagaaatgctgggaagcagggtgcatggcatgggaatacatctccctgatctttgagagagcctctctggatattctttcagagcatgagccaggatgtactgactactttcttcacacatcagttgccctttatgatctcagttcataaactctttgtggtatgtagcaatcaaaagtcatattacttctgtaaaactaacattatatagggtgtatagtcccagacaaattatatgaagctagatttttcttgccctggcccaatttatcattcctcctcctgcccacacctacctcccttt

SEQ ID NO: 361 - DNA, 497 bp, Homo sapiens
aaatacaggtttgtagggtggtattttgttttttccagctataaaaaaaggcccaaaagtgcatgtgtgaggggggaaaggcagaaattaagcaataaagtcattttccctggagggacatgagagggagaaaacaggaggcagtgctgggagaacgcactttcctcaccactgggcttcttgttattcttagtattggtccacaaaagttatattcacattctagctttgatgcctctttcctgggattaaatgagctgaaagacctctgtgaactgtagagaagaccaggggctcagcccagcccagcccagcccctcagggctctgtgctcttctagggatggatggttttggtaaagaacagacgcccagcagcccccggtcactcagcaccagtgtgacagtccctcctctctctgggggtgtgtaagaaaacggcccctatttttaggacaggaagagtagagggggggcctgcagcaagattccatgact

SEQ ID NO: 362 - DNA, 261 bp, Homo sapiens
aaagcttttagagaatacactacaccagggagtatgactactagtatgactattaggagggtaataccaagagttggactacgcaccttaggcaagatacaaaccaactaaaatagaataaagaatgagtcagatgagtgtagccattttaaccaagcagcacatttgttaatttctacaacttagtctcagcgatacccattgtatttagccatgttcaacaacaagtgtcagaaactgcacagactcctccctgttcag

SEQ ID NO: 363 - DNA, 232 bp, Homo sapiens
  misc_feature 46, 126, 132, 156, 225: n = A,T,C or G
gtacaagctttttttttttttttttttttttttttttttatggggngcgtgcaggtagaggcttactaaaagtgtgaaaacgtgggcttggattaaggcgacagcgatttctaggatagtcagtanaattanaattgtgaaaatgataaagtgtanagggaaggttaatggttgatattgctaggggggcgcttccaattaggtgcatgaataggtggcctgcantaatgtt

SEQ ID NO: 364 - DNA, 390 bp, Homo sapiens
ccaccatctatgcaaagtgaaagctctgaacaagggtgatgccaactctgaagtcactgtgtactaccagtcaggtaccaggagtctaagagaatatacgcttatggagctgcttgtgatgcacatggaagaaccttgttttgacttccttcgaaccaagcagacccttgggtaccatgtctaccctacctgtaggaacacatccgggattctaggattttctgtcactgtggggactcaggcaaccaaatacaattctgaagttgttgataagaagatagaagagtttctttctagctttgaggagaagattgagaacctcactgaagaggcattcaacacccaggtcacagctctcatcaagctgaaggagtgtgaggatacccacct

SEQ ID NO: 365 - DNA, 311 bp, Homo sapiens
ctgctgcagatgctgacaggccctgggaggctgctgtgctctggagaagctggagcagctcatttcttggcctagcctggctgcctcagaaagagcagtcaggacttgagggaagcatcaaattctatacccataaactgcagttggaagtcagctttttgaaatgtccagcctttgcccaattgtttcagatcatctcattcctcaggctttggcaggtatcctgccctccatcttattccagtgtgttcacctcatcaaggcagcagagtggatgaaggagtaagtctgccctttgccatactgaacag

SEQ ID NO: 366 - DNA, 611 bp, Homo sapiens
  misc_feature 522, 543, 582, 590, 597: n = A,T,C or G
aaaagatatttaagtttaatacaaattttatacaaagaaaatgtgaaaaaatacttccatatgctaaaagcaattatgcttcacaaataaggccagctaggctattttttttttttgacaactgcaattcacaaatgttctttctctcctgttttcttctaatactctcttatttcttctctaatatgggtaactagctggaaactgtacagttcgcatcctcttaacaatgaagagaaagtaaacaagactaaaatgtacaacaaaacgtactggaatgatatcgtacaattaattttctcatatacatacatcaccttttgctttttcatcaatgctttttgttttacacaacatacaaaatggctctacagcatacgtagtgtacggacagcatgacgggccttgctttctctcatactgcctgtgtttcatgcttacataaaaacgtgaaattccatcatataaataatacgtacatgcttcatcccagactcaaacgtcctctgcgtgcaccttgcntttgagtccttgcttccaagnagcacagcatctctgaccaagtgtgtgtgagtgtgtttntgtgctgngagctgngttcatgtatgtgc

SEQ ID NO: 367 - DNA, 316 bp, Homo sapiens
aaaatcagttacggcaattcacttaaggagcttgagggccgtgttaaaaggagccaggttttcacaagacctcatccacctctgcacattggctggcactgccacactgcagcctccgatctgctggagtacagaccacagcaccacgtctgctacggtgagttcattcccagcgagccaagggctcttcccaagagcagagttcatggagcggaaaacagcggctttttctttactgcttccctcttttaactgaaaaatcgcaatatctacccagctatctataagggttgcgttgacagcattatgcttctgg

SEQ ID NO: 368 - DNA, 304 bp, Homo sapiens
atcagcctctcttactgtactctccgggaatgttaacctttctattttcagcctgtgccacctgtctagacaagctggcttccccattggcccctgtgggtccacagcagcgtggctgccccccagggccaccgcttctttcttgatcctctttccttaacagtgacttgggcttgagtctggcaaggaaccttgcttttagcttcaccaccaaggagagaggttgacatgacctccccgccccctcaccaaggctgggaacagaggggatgtggtgagagccaggttcctctggccctctcca

SEQ ID NO: 369 - DNA, 423 bp, Homo sapiens
ccaggtgatcatttttctacaacggcatttctcaacctcggctgcatataaaattacctgggagctttctaaaaattctgaaatttggtcctaattctcagcagattctgacgtgattaatttggggtgagtgccaggtactgtttttttggtttttttttaatctccctaggtgattttaatgtgaaaccaagattgaagcctcagtctgaagaaaaatagattcatagaaaactctggcccctccccgggggcctgccctgctcgcctcaacatcttgtgctttttggcaagagagggctgaggagcctgctggtcgctctctgcctgggcccgggccctgtctctttggtatcagattctgagcaggggagggagctggaaggagatgcagcagaggaagccaaatgccctcaacaacac

SEQ ID NO: 370 - DNA, 506 bp, Homo sapiens
atttaactgtggggttggcgctgtccttgtggtatcaaaggagcagacagagcagattctgagggatatccagcagcacaaggaagaagcctgggtgattggcagtgtggttgtacgagctgaaggttccccacgtgtgaaagtcaagaatctgattgaaagcatacaaataaatgggtcagtgttgaagaatggctccctgacaaatcatttctcttttgaaaaaaaaaggccagagtggctgtcttaatatctggaacaggatcgaacctgcaagcacttatagacagtactcgggaaccaaatagctctgcacaaattgatattgttatctccaacaaagccgcagtagctgggttagataaagcggaaagagctggtattcccactagagtaattaatcataaactgtataaaaatcgtgtagaattttgacagtgcaattgacctagtccttgaagagttctccatagacatagtctgtcttgcaggattcatgagaattc

SEQ ID NO: 371 - DNA, 364 bp, Homo sapiens
cctttcatccctcgggtgtgctatggatggcttctaacaaaaactacacatatgtattcctgatcgccaacctttcccccaccagctaaggacatttcccagggttaatagggcctggtccctgggaggaaatttgaatgggtccattttgcccttccatagcctaatccctgggcattgctttccactgaggttgggggttggggtgtactagttacacatcttcaacagaccccctctagaaatttttcagatgcttctgggagacacccaaagggtgaagccatttatctgtagtaaactatttatctgtgtttttgaaatattaaaccctggatcagtcctttgatcagtataatttttt

SEQ ID NO: 372 - DNA, 272 bp, Homo sapiens
ctgggtccccccagcaggctccaccgctgagggtcctgacattagctgtcagcccctggcctgctcagactgcaaacggtcatacaaagtggtctagggaccagcaaaaataataaaccacccccataaacagacacatacacaaagtagatttgttacgcagtttacaagcatgttcccatcacacagcaagaccaggacaggtgattcagggtagcagataagggaagacaccaaaacacaggaattgaaaaggcaagacccccgtccac

SEQ ID NO: 373 - DNA, 462 bp, Homo sapiens
aaatgttttaggcaacctaagaacaaatgtaaaagtaaagatgcaggaaaaatgaattgcttggtattcattacttcatgtatatcaagcacagcagtaaaacaaaaacccatgtatttaacttttttttaggatttttgcttttgtgattttttttttgatacttgcctaacatgcatgtgctgtaaaaatagttaacagggaaataacttgagatgatggctagctttgtttaatgtcttatgaaattttcatgaacaatccaagcataattgttaagaacacgtgtattaaattcatgtaagtggaataaaagttttatgaatggacttttcaactactttctctacagcttttcatgtaaattagtcttggttctgaaacttctctaaaggaaattgtacattttttgaaatttattccttattccctcttggcagctaatgggctcttaccaagttt

SEQ ID NO: 374 - DNA, 506 bp, Homo sapiens
ttgttttgttacatagtgtgcaacaaattacaatattctgcagccacaaattatatgcagagtatgaagaaactattaatcagatagtgtaatctttccatttataactctacaaggaagaactagcaaatcagatcttacatataacatctcactaaactttatgcatggaaagtgacagacactgcttgtgctgtttgatacaaaatggctgaacttcatcttcagaagactaaacctgacatctaaacatgccaatataaacatcaaaacaaaatatattctaaccaaccacgggaaacagtctggtatcaggaaagcaacaaggattacacacattattttataaaccagcacacaaaggtttaaaacagttctgaaaatgaagttagctgtcttgagtcaagggaataaaaaaaaagtcagtattgaccatttacaatctctgacctttgtggagacggtaagaatctgttgtagtgcagctacatacagtacaattcagg

SEQ ID NO: 375 - DNA, 425 bp, Homo sapiens
cctggcggaaagaaggctctagaacctgcttatagagccacaacagggtgcagacaactgtgatgtcagccaatgtcactcgttcgcccaccagaaaagtcctcgtcttcaagtaagcatccagcagccctagaattcgcctcacttcctcctttgcattctcagtggcctgtttgttgtggtgcatgatgcccaaggtggggaacacccaggtactggctgggggcactatatcggaatcagcaaagctcacccactgcaccacctgggctgctgcctctggagtacttccccgcagctcctcattgctcacatagtaggcaatggcgttgctctcaaacacacagaatccatcatcaccctcaaatgctgggaccttgccggcaggaaatttgcggagaaattcaggggtgcggttggtttgg

SEQ ID NO: 376 - DNA, 417 bp, Homo sapiens
ctaatatttcactttacatccaaacatcactttggcttcgaagccaaagtgatgtttggatgtaaagtgaaatattagttggcggatgaagcagatagtgaggaaagttgagccaataatgacgtgaagtccgtggaagcctgtggctacaaaaaatgttgagccgtagatgccgtcggaaatggtgaagggagactcgaagtactctgaggcttgtaggagggtaaaatagagacccagtaaaattgtaataagcagtgcttgaattatttggtttcggttgttttctattagactatggtgagctcaggtgattgatactcctgatgcgagtaatacggatgtgtttaggagtgggacttctaggggatttagcggggtgatgcctgttgggggccagtgccctcctaattgggg

SEQ ID NO: 377 - DNA, 457 bp, Homo sapiens
  misc_feature 346, 419: n = A,T,C or G
cctgacattcctgccttcttgtactaataagaaaaataaaacaaaatagtgttgaagtattggggcggcgaaaattttggggagtggtatggagagagaatgggcaatgtttctcagggctgcttcaagcgggatcaggggcggcgtgggaacctagagtgggagagattaagctgaagggagatcttgtggtaaggggtgatattgtggggttgttagaagcaacatttgtcgtgtagaattattggtgatggcctggatatggttttgtatgaattgaaaaactaaatggaataagaaaaggagaaaaacaggtataaaaggactaagaattgggaggacctangacatctgattagagagtgcctaaggaggttcagcatagtcctgccagcaaagattatttatttacttcaagngtttagagtggcagtttggggatagcacgaggagatac

SEQ ID NO: 378 - DNA, 315 bp, Homo sapiens
ccaggaggcagtggaggaagtgggggttatggtgggaggagccgatactgagcttcttcctatttgccatgggcttcactgtataaataggagaggatgagagcccagaggtaacagaacagcttcaggttatcgaaataacaatgttaaggaaactcttatctcagtcatgcataaatatgcagtgatatggcagaagacaccagagcagatgcagagagccattttgtgaatggattggattatttaataacattaccttactgtggaggaaggattgtaaaaaaaaaatgcctttgagacagtttcttagct

SEQ ID NO: 379 - DNA, 552 bp, Homo sapiens
  misc_feature 399, 526: n = A,T,C or G
gcgagaatgaagactattctcagcaatcagactgtcgacattccagaaaatgtcgacattactctgaagggacgcacagttatcgtgaagggccccagaggaaccctgcggagggacttcaatcacatcaatgtagaactcagccttcttggaaagaaaaaaaagaggctccgggttgacaaatggtggggtaacagaaaggaactggctaccgttcggactatttgtagtcatgtacagaacatgatcaagggtgttacactgggcttccgttacaagatgaggtctgtgtatgctcacttccccatcaacgttgttatccaggagaatgggtctcttgttgaaatccgaaatttcttgggtgaaaaatacatccgcagggttcggatgagaccaggngttgcttgttcagtatctcaagcccagaaagatgaattaatccttgaaggaaatgacattgagcttgtttcaaattcagcggctttgattcagcaagccacaacagttaaaaacaaggatatcaggnaatttttggatggtatctatgtctct

SEQ ID NO: 380 - DNA, 139 bp, Homo sapiens
aaataactattcctcctccattccatcgactcccagcaccagccaggaggaccctcagttcagtgttcctcccactgccaacacacccacgcccgtttgcaagcggtccatgcgctggtccaacctgtttacatctgag

SEQ ID NO: 381 - DNA, 186 bp, Homo sapiens
ccaggcatggtggcacatgcctgtggtcccagctactcaggaggcggaggcgggagaaccccttgagccagggagttggaggttgcagtgagccgagatcgtgccacagcactctagcctggcaacagagcgagactccgtctccaaaaaaaaaaaaaaaagaagatagtttacacaacaccacag

SEQ ID NO: 382 - DNA, 403 bp, Homo sapiens
tttttttttttttttaagaccctcatcaatagatggagacatacagaaatagtcaaaccacatctacaaaatgccagtatcaggcggcggcttcgaagccaaagtgatgtttggatgtaaagtgaaatattagttggcggatgaagcagatagtgaggaaagttgagccaataatgacgtgaagtccgtggaagcctgtggctacaaaaaatgttgagccgtagatgccgtcggaaatggtgaagggagactcgaagtactctgaggcttgtaggagggtaaaatagagacccagtaaaattgtaataagcagtgcttgaattatttggtttcggttgttttctattagactatggtgagctcaggtgattgatactcctgatgcgagtaatacggatgtgtt

SEQ ID NO: 383 - DNA, 436 bp, Homo sapiens
ccacaactgtgaagttagaaaagccctgtcaaagcaagagatggctagtgctccatccagccaaagaggtcgaagtggttctggaaactttggtggtggtcgtggaggtggtttcggtgggaatgacaacttcggtcgtggaggaaacttcagtggtcgtggtggctttggtggcagccgtggtggtggtggatatggtggcagtggggatggctataatggatttggtaatgatggaagcaattttggaggtggtggaagctacaatgattttgggaattacaacaatcagtcttcaaattttggacccatgaagggaggaaattttggaggcagaagctctggcccctatggcggtggaggccaatactttgcaaaaccacgaaaccaaggtggctatggcggttccagcagcagcagtagctatggcagtggc

SEQ ID NO: 384 - DNA, 299 bp, Homo sapiens
ccattcttttatcttgggtccatgtgagtgacagaaatggtgcggcctgggaaagatctccctcctttacattttctcttctccctcctcctccttattctaaaactgtgcctccaacagaggggcaggggctcttgtagagagatccctggcccaggacaggagatgccaaatctaatttatctcactgagggcctttgagaaaaacgcttctgggccaggctcagtggctcatgcctatataatcccagtactttgagaagctgaggcggcagatcacttgaggccaggagttcgag

SEQ ID NO: 385 - DNA, 452 bp, Homo sapiens
ctaacctgttacactgggctgggttgggtagggtgttctggcttttttgtggggtttttatttttcctcagtccattgttccacgtttaagaactaggaataccaggactgatgcaattctactgggtcactatcgcttgtcacaagacacagacaatcagaccaaagtatttgctgtaataactaagaaaaaagaagaaaaaccacttgactataaatacagatattttcgtcgtgtccctgtacaagaagcagatcagagttttcatgtggggctacagctatgttccagtggtcaccagaggttcaacaaactcatctggatacatcattcttgtcacattacttacaaatcaactggtgagactgcagtcagtgcttttgagattgacaagatgtacacccccttgttcttcgccagagtaaggagctacacagctttctcagaaagg

SEQ ID NO: 386 - DNA, 482 bp, Homo sapiens
aaaactgtggcaccttatttcttttgaaatgtcactttataaggtgtatgtagaaagcaacagcagcagttacaaaatgttgtctgagtgattctgagagctcaaaacaaggatccgcgtataggctgaagaaaaagacgttcagttaacagtgcgcgctgtagaactttaacacaagtcttcaggtggaattcctgtgtaaaccttagtagagatgcgactcacggagaccaaaagtaaaaatctctttaccgtttacagtttagtgaggtggtctgcattctcgcaaacgacttacaaagtacaagaaatgttgcgtgtgagtattaggcatagaatatttcattttcttacggaaggagcagcaggggacaggaaacctagtggacgccccgccaccacctttcccgaagatgcacacccccaggaacggcagtgcaagcctggcagcaagccacccttacaattctttttggttgttt

SEQ ID NO: 387 - DNA, 517 bp, Homo sapiens
gaacctgctaaggctgcctcagacctgactgcctggttcagcctcttcgctgacctcgacccactctcaaatcctgatgctgttgggaaaaccgataaagaacacgaattgctcaatgcatgaatctgtacccttcgggagggcactcacatgccgcccccagcagctcccctgggggctagcagaagtataaagtgatcagtatgctgttttaataattatgtgccattttaataaaatgaaagggtcaacggccctgtttatattggtataattatttactcttatttggtataaagggttttcgtgtatctctatgtggatctaaataatacaggattgtctagaagcggtttccaggccaccgctctcctgcctacatcccatcatggctgctgcggtgtcactgggctaccgtgagatccaagttgaaatcagaagcctactttgatggtaggtttgaatgacgtgtcctacagcctcagaggcagcaggaggctagcaaagcttaaatgcc

SEQ ID NO: 388 - DNA, 544 bp, Homo sapiens
  misc_feature 468: n = A,T,C or G
ctgtttatgatcagcaagactggggaggccgagaccatcaccacccactacctgttcttcctgggcctctatcgtgctttgtatcttgtcaactggatctggcgcttctactttgagggcttctttgacctcattgctgtggtggccggcgtagtccagaccatcctatactgtgacttcttctacttgtacattacaaaagtactcaagggaaagaagctcagtttgccagcataagtgccaaagaccatcaccagcatctgtccttcagggtgctcggacagaattcttaccacagcaaaggcataagatgcttgatacggaaaatcagaaacttaactcttttgttgcagatagtcatcagtggctctgtaaaaacgcagaggaaaagagccagaaggtttctgtttaatgcatcttgccttatctttttttattactgtgtacaaagatttttttacacaaagnaacttaatgctgtattaataaattcagtgtgtagcttcaattgggatagttccaaaagtgaagattttgtgaggaa

SEQ ID NO: 389 - DNA, 542 bp, Homo sapiens
ctgacaagcccttgcgcctgcctctccaggatgtctacaaaattggtggtattggtactgttcctgttggccgagtggagactggtgttctcaaacccggtatggtggtcacctttgctccagtcaacgttacaacggaagtaaaatctgtcgaaatgcaccatgaagctttgagtgaagctcttcctggggacaatgtgggcttcaatgtcaagaatgtgtctgtcaaggatgttcgtcgtggcaacgttgctggtgacagcaaaaatgacccaccaatggaagcagtgttgcttgttcagtatctcaagcccagaaagatgaattaatccttgaaggaaatgacattgagcttgtttcaaattcagcggctttgattcagcaagccacaacagttaaaaacaaggatatcaggaaatttttggatggtatctatgtctctgaaaaaggaactgttcagcaggctgatgaataagatctaagagttacctggctacagaaagaagatgccagatgacacttaagacctacttgtgatattt

SEQ ID NO: 390 - DNA, 276 bp, Homo sapiens
ctgatgccagaaggaaagccgaaatgctacaaaatgaagcaaaaactcttttagctcaagcaaatagcaagctgcaactgctcaaagatttagaaagaaaatatgaagacaatcaaagatacttagaagataaagctcaagaattagcaagactggaaggagaagtccgttcactcctaaaggatataagccagaaagttgctgtgtatagcacatgcttgtaacagaggagaataaaaaatggctgaggtgaccaaggtaaaacaactacatttt

SEQ ID NO: 391 - DNA, 189 bp, Homo sapiens
ctgctggtggatcagatatacgagaacgccatgattgctgctggacttgttgacgaccctagggccatggtgggccgcttgaatgagctgcttgtcaaggccctggagcgacactgacagccagggggccagaaggactgacaccacagatgacagccccacctccttgagctttatttacctaaattt

SEQ ID NO: 392 - DNA, 395 bp, Homo sapiens
cggaaacaaggcagatggagtcctggtgggaacagatggaaggtactcttcgatggcggccagtttcaggtccagtgagcatgagaatgcctatgagaatgtgcccgaggaggaaggcaaggtccgcagcaccccgatgtaaccttctctgtggctccaaccccaagactcccaggcacatgggatggatgtccagtgctaccacccaagccccctccttctttgtgtggaatctgcaatagtgggctgactccctccagccccatgccggccctacccgcccttgaagtatagccagccaaggttggagctcagaccgtgtctaggttggggctcggctgtggccctggggtctcctgctcagctcagaagagccttctggagaggacagtcag

SEQ ID NO: 393 - DNA, 230 bp, Homo sapiens
ctgccaaggagaccctgttatgctgtggggactggctggggcatggcaggcggctctggcttcccacccttctgttctgagatgggggtggtgggcagtatctcatctttgggttccacaatgctcacgtggtcaggcaggggcttcttagggccaatcttaccagttgggtcccagggcagcatgatcttcaccttgatgcccagcacaccctgtctgagcaacacgtg

SEQ ID NO: 394 - DNA, 522 bp, Homo sapiens
ctgtggttttgccagtcacactgatgagtccaaaaaacctaaaggctcaaccagacctccagctcccagtgaaggttcccagtagctcagtgtggcaaaggcaggtttctgtcttccaacctgccatggttcccatgtttcccccaaagtttgcgtcttagaaacttaatccccagtgcggcagtgttgggacatgggtaggtcgggagggctctgccactgccattacaatgaggtaatatccttgtcacctgagagtggtttttgtgaaggccggtgtggggctcctcttgctggcttgctctctggctctctcgccctttccccttctgccttccaccatgggatgtcctagcaggaaggccctaagcagatacaggctgttgctgttggactttgcagcctccagaactgtaagaaatacatttcttttctttataaattacctactctgtggtattctgttacaggaacacaaaacagaccaagacaccaaccctgacctgctctgtccttcccttc

SEQ ID NO: 395 - DNA, 387 bp, Homo sapiens
ccgcctccgccgcgcgcctcctccgccgccgcggactccggcagctttatcgccagagtccctgaactctcgctttctttttaatcccctgcatcggatcaccggcgtgccccaccatgtcagacgcagccgtagacaccagctccgaaatcaccaccaaggacttaaaggagaagaaggaagttgtggaagaggcagaaaatggaagagacgcccctgctaacgggaatgctaatgaggaaaatggggagcaggaggctgacaatgaggtagacgaagaagaggaagaaggtggggaggaagaggaggaggaagaagaaggtgatggtgaggaagaggatggagatgaagatgaggaagctgagtcagctacgggcaagcgggcag

SEQ ID NO: 396 - DNA, 176 bp, Homo sapiens
cctatgaccttggccgcagggctattgcttatgccactcacagagacagctattctggaggcgttgtcaatatgtaccacatgaaggaagatggttgggtgaaagtagaaagtacagatgtcagtgacctgctgcaccagtaccgggaagccaatcaataatggtggtggtggcag

SEQ ID NO: 397 - DNA, 419 bp, Homo sapiens
ctgtggcctggccgctcccaatgctgggggcttggcttggtgccccatccccttcctgactgagctctatgaaggactcttaaaaaaataaaataaaatgcaagcaaagtgctttgaaaggagggaggacaccctattcctgctaaggggtagaggaagaaggtgaaggcggctaggtgcccataagaggaggctggcacaatcttcattcccgccagtgtgatttcagtctcaaaagatgagtatttggctgagaaatggaaggatactccaggctccctacggagttgtgctggggccatgctgagctgcccttgcaggcagccctgggtgctgggggcagacatgcaggacactgggaagagtcagaaccacaggtgggagggaatctcagagcccaggctccccactgagcttgg

SEQ ID NO: 398 - DNA, 478 bp, Homo sapiens
  misc_feature 466: n = A,T,C or G
aaattctttaattaaggcattggtcccaacggtgcacatagattaagggattttgcttccttctgaactagatcatttgttagaggcttcagaaaaagaaaattagcttgaaatctagtctgggaaattgggggcagggaatgaaaaagttggtctcttgtttctccacgatacacaggcttcccatctaaagtcatgcttaactaaaagggaaaaaaaatgaaccaagcaaaagtatatagagtagccgtgacatttgcattattttctagactttacatttgcctgcaacaggcataacatgaaactccagagggaatttggattgataggaatgttcacataaacaccagcagtggctaactgttacacaacattcaaagtattcgagagaactgcctggagacagagagcgagggtccacagacacattagcaccatactgataggtcatgcagcaggatgntccctcccgagt

SEQ ID NO: 399 - DNA, 298 bp, Homo sapiens
ctgggtggtcctgccctgcatccgagagggtgtcgggacactcatccagatggctctgagacagcagcagagctgacaaggaggccccacaagtgagattcctttggcttcaaggtcgcaagtcctgtccttgggcctcctggcctgctgagcctcccaccggctttaccctcagagattgctgcagaagcccgtgtgctggaatgggctgccacatttctaggaaggaacccgggggcacatgtagcctggttattcaatgttatcatagacgtgaatcacatcctcgtggttgctg

SEQ ID NO: 400 - DNA, 309 bp, Homo sapiens
aaagtacttttaagaaaaaaagcagggccttggaagttttggttcttttttcctcccctgttgcaaattctcatggtttgggttgggtggtggagagcgcgtgtcatctgcgggtggcactgcccacggtgggcgggcgggcctctctactcgaaggtgaccacgtttagattctgagacgggaagtggagggtgaataggtcacggcggccttttttttttagtttaacttttccttttttgctgtctagtcatcctcgtcggtcttctgcttcttggtatcgacatcgtcatcctcatcatcttcag

SEQ ID NO: 401 - DNA, 485 bp, Homo sapiens
tgactaagatggaagcgtttttggggtcgcggtccggactttgggcggggggtccggccccaggacagttttaccgcattccatccactcccgattccttcatggatccggcgtctgcactttacagaggtccaatcacgcggacccagaaccccatggtgaccgggacctcagtcctcggcgttaagttcgagggcggagtggtgattgccgcagacatgctgggatcctacggctccttggctcgtttccgcaacatctctcgcattatgcgagtcaacaacagtaccatgctgggtgcctctggcgactacgctgatttccagtatttgaagcaagttctcggccagatggtgattgatgaggagcttctgggagatggacacagctatagtcctagagctattcattcatggctgaccagggccatgtacagccggcgctcgaagatgaaccctttgtggaacaccatggtcatcggaggc

SEQ ID NO: 402 - DNA, 260 bp, Homo sapiens
ccgggcaggtaaagcttttagagaatacactacaccagggagtatgactactagtatgactattaggagggtaataccaagagttggactacgcaccttaggcaagatacaaaccaactaaaatagaataaagaatgagtcagatgagtgtagccattttaaccaagcagcacatttgttaatttctacaacttagtctcagcgatacccattgtatttagccatgttcaacaacaagtgtcagaaactgcacagactcc

SEQ ID NO: 403 - DNA, 76 bp, Homo sapiens
  misc_feature 7, 11, 18, 30, 31, 46, 47, 61, 62: n = A,T,C or G
ctggganatgncgagctnctctggcatctnnatggacacattcagnntcttgggcacccannctaagccgaatgtg

SEQ ID NO: 404 - DNA, 439 bp, Homo sapiens
aaaattataagatttacagtgccttgattatgcaaaatagcataatggaaattaaaccaaatcaataaaccaaagagaaagaaaacttaattttctctagtatccatacttaaaccatctttgtaagtatctgatgtcccaaccatgtcttatgtagaaagtataatcgtttcaaatgtttcacttgcaggtttaatttctcattttcaatttttatgaactgtaatgcaatttcaaatcctattatacctagtgtttatactgcaacagcagcaaatctcacatgtgtaatcaaatgtggaactggggcacagcttctagctgtagacagaaattatacactgcattcagtccaggagagtacattacattaaccagagcgtagagtttagtacacttattgcagggttggtatttctttccctctgatctgaatcag

SEQ ID NO: 405 - DNA, 365 bp, Homo sapiens
aaaaaaaattaattgctccaagttttcaggcccaggggaggctctcccattctcctccttcaatagtcccgtccaggaagggtgatcttgtggataaattcatcatacttcactttgccattgggttcgatatctgcttccctgaagagatcatccacttccttgtgggtgagcttctcccccagactcgtgagttttgaccgcaggtcggacgccatgacgtaacctttcttctccttgtccaccatcaacatggctagaagaatttctttctttgggtcttcttgttttatttgcatgtgcataatggtcagaaaagtggagaaatccagctctccatttccgtctatcccgtgggtctgcag

SEQ ID NO: 406 - DNA, 274 bp, Homo sapiens
ctggaagccttgttggcccctaagcctttgtttcatgctacagtactgaggggtatgtgtccccaatgcacagccacccgcacacaactcaatgagcttcctgggaaacactattcccccacctccaccttaggtggctgcctcagttttccaaccacaggaatcagtccctcagctcctgcctctagtctccaccccaaaagttcagtcgtctctgtcttggagggcactgtcggccccctcaggttgaagttcaacactcctcaatgagcag

SEQ ID NO: 407 - DNA, 440 bp, Homo sapiens
aaaaagacttgtgcacttgcccaggctcaaggatattaaaatctagcacataaagcccattactagaggtagaaatacaggcaatatactattacggcaacaaccatcaattacagttaagaatttttctgtaacaaccaaatggataatcaaatattgcaacaactcaagtattactgagcaaagtgcatttctacagtattcagtgctgctattcagttttctaacttaaaacagcctatgataactggcagcaaagaaggtccttgcaatagactgcctctgcttgagaacttatgatgtaattattgcatgctgctaatatactatctaaacattaaagatactcctaaaatatttgatggtagactatgattaagacattacactacaaaaaaaccttatgcagaaggaaatcctaactgacgtgcttctgcttt

SEQ ID NO: 408 - DNA, 266 bp, Homo sapiens
ctgcagcttttcaccacattttcaattactgaattgcatgttttttttccaccttgataacttagggtcagtagaaagctatttacttacatgttatagtcaatataactatactaaatgcccatttgtaattgaagaaactcacagacacagtatgaactatattatacaaaatcatgaccatgagtttcagtgagagattctgtctctctcttaaagcaagaaatatcccacagctcagatttacataagtagtgccgcctttt

SEQ ID NO: 409 - DNA, 516 bp, Homo sapiens
ccagctttattaccagattgtcatccagcttcccatgatcaacaatgttatgtactttcagatcaacaacaaaacgggagccatctctcttacccgagagggatctcaggaattgaatcctgctaagaatccttcctataatctggtgatctcagtgaaggacatgggaggccagagtgagaattccttcagtgataccacatctgtggatatcatagtgacagagaatatttggaaagcaccaaaacctgtggagatggtggaaaactcaactgatcctcaccccatcaaaatcactcaggtgcggtggaatgatcccggtgcacaatattccttagttgacaaagagaagctgccaagattcccattttcaattgaccaggaaggagatatttacgtgactcagcccttggaccgagaagaaaaggatgcagtgagtaaaagagaagagtttcacaggcgacaagacaaagtcctatgcccatctacagttgagagcaaaatggattttacttt

SEQ ID NO: 410 - DNA, 379 bp, Homo sapiens
cggcgccgcgcccatagccggacggggatctgagctggcaggatgaatgtgggggtggcacccagcgaagtaaaccccaacacccgagtgatgaatagccgaggcatctggctggcctacatcatcttggtaggattgctgcatatggttctactcagcatccccttcttcagcattcctgttgtctggaccctgaccaacgtcatccataacctggctacgtatgtcttccttcatacggtgaaagggacaccctttgagactcctgaccaaggaaaggctcggctactgacacactgggagcaaatggactatgggctccagtttacctcttcccgcaagttcctcagcatctctcctattgtgctctatctcctgg

SEQ ID NO: 411 - DNA, 576 bp, Homo sapiens
  misc_feature 534, 541: n = A,T,C or G
aaacattacccagcatcattgtttataatcagaaactctggtccttctgtctggtggcacttagagtcttttgtgccataatgcagcagtatggagggaggattttatggagaaatggggatagtcttcatgaccacaaataaataaaggaaaactaagctgcactgtgggttttgaaaaggttattatacttcttaacaattctttttttcagggacttttctagctgtatgactgttacttgaccttctttgaaaagcattcccaaaatgctctattttagatagtttaacattaaccaacataattttttttagatcgagtcagcataaatttctaagtcagcctctagtcgtggttcatctctttcacctgcattttatttggtgtttgtctgaagaaaggaaagaggaaagcaaatacgaattgtactatttgtaccaaatctttgggattcattggcaaataatttcagtgtggtgtattattaaatagaaaaaaaaaattttgtttcctaggttgaaggtctaattnatacgtntgacttatgatgaccatttatgcactttcaaatga

SEQ ID NO: 412 - DNA, 377 bp, Homo sapiens
  misc_feature 332: n = A,T,C or G
ccaaatgtgttacttgtgcaccaaagagttttttaaaaagagatttgcctacgggtgagcactgaagtatacattgtgccaatgtaattattgtcttggagaccttctagaacttgctaaatcatatagcaagaagagaatgagttcaggcccagtaaatctggtgagttaatttacatctgtgatactgccgtttttcccattaaatgtggttatggcaaagcattcttagggtaataaataaataaataaactttggacaatgcctttacttgtgccctatatacagaactattccatagaattttccaggatttcaagatactacacanagaaaaaaactgtaaagcaatttggtcctttccaaatttcagcag

SEQ ID NO: 413 - DNA, 584 bp, Homo sapiens
  misc_feature 557: n = A,T,C or G
aaaataattacccatctttcagtcaatacacagccaactcttgattatctatgagaaacgtaagtgacatttactctcaaacttcactctaacagaatcatccacctttgatacacttgtttgttttacatcccatgtacactacagcctatcaagacgaagttataacacaaatgttgtttcctctgacccatgctagaaacgtgtaaggaaatggagtgagcacattctgctagggctttgcggatgaccctacagtggacagtgggggcaggatagaactctggacatgagaaaagacaaatttcatgttcctccagaatcaggtcttacatgccttcgttattttgttatcacaaaattaaaaacctgaggcttagtcactattttatatagataatggagagttgactgtaatcatgttatgactttagctctttaacatgaaaaaattcacaagaaagcatatgataaaaagattaaaaagactgccatgacatctagaagcatttattttatgcaaaaaacttaaatatgattatgtgtacacataaagngcacacattacctatgctgaacaatgc

SEQ ID NO: 414 - DNA, 229 bp, Homo sapiens
ctggatggctcttatgttatcatctgtttccatcgtggcctggagttttccattcacactgaatgtacagaagaggccgttttcatagaatatgacacaatgaccctctcttgaagcctgaatgagttttggtttcaggcagttttcaggaccctccaaggtcctcaacaagtctccattcatggaatgtatgagacatggtccttcttgtgaaccactcaacaccagg

SEQ ID NO: 415 - DNA, 597 bp, Homo sapiens
  misc_feature 547, 549, 551: n = A,T,C or G
ctgagagcggaaaatggtcttctcatgactccttgttacactgcaaattttgttgcaccagaggttttaaaaagacaaggctatgatgctgcttgtgatatatggagtcttggtgtcctactctatacaatgcttaccggttacactccatttgcaaatggtcctgatgatacaccagaggaaatattggcacgaataggtagcggaaaattctcactcagtggtggttactggaattctgtttcagacacagcaaaggacctggtgtcaaagatgcttcatgtagaccctcatcagagactgactactgctcttgtgctcagacatccttggatcgtccactgggaccaactgccacaataccaactaaacagacaggatgcaccacatctagtaaagggtgccatggcagctacatattctgctttgaaccgtaatcagtcaccagttttggaaccagtaggccgctctactcttgctcagcggaaaggtattaaaaaaatcacctcaacagccctgtgaagtgacctcagtgagatatttggtncntngtgtaagctgatagcacaagttctggcgacaggtagcacgtatctg

SEQ ID NO: 416 - DNA, 318 bp, Homo sapiens
ctggatggggagtccttgagggaggaactttatcttcccacgcagggcccccagcacctaacacagtgctgacatctgtaattgctcaataaacatcaactgaatggatacatgaaaagaaaggaacaaagaggtgagaaggcagagggacagaagctgacccccaggggccccatcacagacccctggagaaccagtgtgaccagcacatgcttccgtggggaggatgggcaggggagaggggcactgcagaggaggctgggccaggggggaaccacacgtgttccagcacgtgcacctgcaggtctccatgcacag

SEQ ID NO: 417 - DNA, 541 bp, Homo sapiens
  misc_feature 464: n = A,T,C or G
ctgctgtggttgctcccattacaacgggctatacggtgaaaatcagtaattatggatgggatcagtcagataagtttgtgaaaatctacattaccttaactggagttcatcaagttcccactgagaatgtgcaggtgcatttcacagagaggtcatttgatcttttggtaaagaatctaaatgggaagagttactccatgattgtgaacaatctcttgaaacccatctctgtggaaggcagttcaaaaaaagtcaagactgatacagttcttatattgtgtagaaagaaagtggaaaacacaaggtgggattacctgacccaggttgaaaaggagtgcaaagaaaaagagaagccctcctatgacactgaaacagatcctagtgagggattgatgaatgttctaaagaaaatttatgaagatggagacgatgatatgaagcgaaccattaataaagcctgggtngaatcaagagagaagcaagccaaaggagacacggaattttgagactttaaagtcgttttgggaactgtgatgtgatg

SEQ ID NO: 418 - DNA, 294 bp, Homo sapiens; identical to SEQ ID NO: 292

SEQ ID NO: 419 - DNA, 419 bp, Homo sapiens
ccaattgaaacaaacagttctgagaccgttcttccaccactgattaagagtggggtggcaggtattagggataatattcatttagccttctgagctttctgggcagacttggtgaccttgccagctccagcagccttcttgtccactgctttgatgacacccaccgcaactgtctgtctcatatcacgaacagcaaagcgacccaaaggtggatagtctgagaagctctcaacacacatgggcttgccaggaaccatatcaacaatggcagcatcaccagacttcaagaatttagggccatcttccagctttttaccagaacggcgatcaatcttttccttcagctcagcaaacttgcatgcaatgtgagccgtgtggcaatccaatacaggggcatagccggcgcttatttggcctgg

SEQ ID NO: 420 - DNA, 118 bp, Homo sapiens
aaaggaacatacttgcctggagatagcctttgcgatatttaaatgtccgtggatacagaaatctctgcaggcaagttgctccagagcatattgcaggacaagcctgtaacgaatagtt

SEQ ID NO: 421 - DNA, 275 bp, Homo sapiens
ctgctcgatgggcttaaaccgccactcgtcagcctccagctcttctaccaaaccagctagtttttccatccgagcaacttgctgatcatgtttcacctgtttaagcgtggatgccacttgatagctaaaaacagattcgcagaggaatctctcagagccatcttctaacatctctccagctcctttggggtaggtgaaaagggctttccgtggtggggcaaggtctgagacactgaaaccagatccagtgacagaacttccactgaccccaccag

SEQ ID NO: 422 - DNA, 494 bp, Homo sapiens
ccttatttctcttgtcctttcgtacagggaggaatttgaagtagatagaaaccgacctggattactccggtctgaactcagatcacgtaggactttaatcgttgaacaaacgaacctttaatagcggctgcaccattgggatgtcctgatccaacatcgaggtcgtaaaccctattgttgatatggactctagaataggattgcgctgttatccctagggtaacttgttccgttggtcaagttattggatcaattgagtatagtagttcgctttgactggtgaagtcttagcatgtactgctcggaggttgggttctgctccgaggtcgccccaaccgaaatttttaatgcaggtttggtagtttaggacctgtgggtttgttaggtactgtttgcattaataaattaaagctccatagggtcttctcgtcttgctgtgttatgcccgcctcttcacgggcaggtcaatttcactggttaaaagtaagagacag

SEQ ID NO: 423 - DNA, 340 bp, Homo sapiens
caagaatttggtgtggacgttggccctgtttgctttttataaaccaaactctatctgaaatcccaacaaaaaaaatttaactccatatgtgttcctcttgttctaatcttgtcaaccagtgcaagtgaccgacaaaattccagttatttatttccaaaatgtttggaaacagtataatttgacaaagaaaaatgatacttctctttttttgctgttccaccaaatacaattcaaatgctttttgttttatttttttaccaattccaatttcaaaatgtctcaatggtgctataataaataaacttcaacactctttatgataacaaaaaaaaaaaaaaaa

SEQ ID NO: 424 - DNA, 444 bp, Homo sapiens
caaatctctttttttaggttttgtccatagcatcagttgatccttactaagtttttcatgggagacttccttcatcacatcttatgttgaaatcactttctgtagtcaaagtataccaaaaccaatttatctgaactaaattctaaagtatggttatacaaaccatatacatctggttaccaaacataaatgctgaacattccatattattatagttaatgtcttaatccagcttgcaagtgaatggaaaaaaaaataagcttcaaactaggtattctgggaatgatgtaatgctctgaatttagtatgatataaagaaaacttttttgtgctaaaaatactttttaaaatcaattttgttgattgtagtaatttctatttgcactgtgcctttcaactccagaaacattctgaagatgtacttggatttaattaaaaagttca

SEQ ID NO: 425 - DNA, 361 bp, Homo sapiens
ccagcgcgcgaggaccgccgaacagccgcgtctctcggtccgccctggaaaatctcttcttcctcaggagtcagcttggctcccttcttgcggcccaggggcagcgcatagtgggactcgtaccactgtcggtacggtgtgctgtcgatgagcacgatgcaattcttcaccagggtcttggtacgaaccagctcgttattagatgcattgtagacaacatcgatgatccttgttttacgagtacaacactctgagccccaggagaaattccccacgtccaacctcagggcacggtatttcttgttacctccccgcacacggactgtgtggatgcggcgggggccaatcttggtgttggcag

SEQ ID NO: 426 - DNA, 440 bp, Homo sapiens
gccaaacaatacccacttgtcacgccaaatgaagagagaaatgtcatggaagagggaaaagactttcagccctcaagatctacagctcaacaggaacttgatgggaaacctgcttctcctactccggttattgtggcctcccacacagccaacaaagaagaaaagagtttactcgaactagaagtagatttggataatttggaattagaagatattgacacaacagatatcaatctggatgaagatattttggatgattgactgtaatgctttccatttacctgactaaacagatcattattatatataggtattgattgctaccctgaccacagtgctttggactatgagaaacttcttagatttttatatgtaaatgctgtggaccactgggagcacaatgcccacatcatcttaagaagagtttatgtgcagcattt

SEQ ID NO: 427 - DNA, 608 bp, Homo sapiens
ccacaaaacaccaaagaattgtaggcagtggcccctattgagaagttttccggtagagttggaaatcagttgtgaatacattctttgctagttggagtgcttgtttactaagcatgtgccgtcgtaggtattagtgctagtctcaaataggtgcttcccctgaggtgcaggggaagaccaaagtttgcaactcgaactgctttcgtccatgtttctcacattgctgtattttagaaaataggggttaagactgataacaaccttttacattgtgactgtgtttgcattgtctaatgacagataaatccttaacatttctctccaccttagtactttagactaattgtgtttgtccgtccatgccatgaatgagtgggctgtagttgggcctaaataaatgagctgttggaagaaaagaatcacagtactttccagcagtcagtccctggttcctagatgtgttctaagcaatgcaaatgtctaattgtcccccagtgggcatagtcagtgtcgtttatattgtagcagttacagctctgtagtttatgatgcaaatctgccaagagagatgtatgtgtcactgcatggcttctgaaagcaggatgaat

SEQ ID NO: 428 - DNA, 299 bp, Homo sapiens
  misc_feature 298: n = A,T,C or G
gtttttctcattttggatttctccaaaactaactgaatttaagcttcaggtccctttgtatgcagtagaaaggaattattaaaaacaccaccaaagaaaataaatatatcctacttgaaatttactctatggacttacccactgctagaataaatgtatcaaatcttatttgtaaattctcaattttgatatatatatgtatatatgcatatacatatccacacttgtctgcaagaatattgattaaaattgctaaatttgtacttgttcatcaaaaaaaaaaaaaaaaaaaaaaaanc

SEQ ID NO: 429 - DNA, 574 bp, Homo sapiens
  misc_feature 502, 551: n = A,T,C or G
ctgcaccatgccatctatagagataggaacggtgggtggtgggaccaacctactacctcagcaagcctgtttgcagatgctaggtgttcaaggagcatgcaaagataatcctggggaaaatgcccggcagcttgcccgaattgtgtgtgggaccgtaatggctggggaattgtcacttatggcagcattggcagcaggacatcttgtcaaaagtcacatgattcacaacaggtcgaagatcaatttacaagacctccaaggagcttgcaccaagaagacagcctgaatagcccgacagttctgaactggaacatgggcattgggttctaaaggactaacataaaatctgtgaattaaaaaagctcaatgcattgtcttgtggaggatgaatagatgtgatcactgagacagccacttggtttttggctctttcagagaggtctcaggttctttccatgcagactcctcagatctgaacacagtttagtgctttacatgctgngttctttgaagagatttcaacaagaatattgtatgttaaagcatcaganatggtaatctacagctcacctct

SEQ ID NO: 430 - DNA, 181 bp, Homo sapiens
aaactagaggaaagctacgacatggagagtgtcctacgcaacctgggcatgactgatgccttcgagctgggcaaggcagacttctctggaatgtcccagacagacctgtctctgtccaaggtcgtgcacaagtcttttgtggaggtcaatgaggaaggcacggaggctgcagccgccacag

SEQ ID NO: 431 - DNA, 591 bp, Homo sapiens
  misc_feature 527: n = A,T,C or G
ctgtcctggttgccctcggtgcagctccgagctccagttacaaggaattccaagttctcaggatcttgaagactctggaggccagtaatccctggatcacactgcttctaccagctcagaagagaagtcctgcctaaggtcatgaaataaacctgactgctgccaccagaccgaacagaggcaaagaacaccttgtcattgcgttcacacaagaattttagtctttgagcccttttgtgcatgaacacaccatccaagtgaccagtttccacagatcggatctctatggccttctctccccagcccattgtctgattggatcgaatatatgctactgatgtaggcatctctccccactgtagaactacatccttggtgatccttccatatgtgtttacataaaccccctcatcttcatagcacaccagaagctccattccatctgtattggggaggatgatgattgcatggggtttgatgctacactggatatgtgttggtagataaatgtcatagactgatcctgnatccacatcaacagcatggaatccagcacaggatccatagatcactttcaacctctggccttcc

SEQ ID NO: 432 - DNA, 548 bp, Homo sapiens
  misc_feature 537: n = A,T,C or G
cctttctgaggcagcagcaagcagctccaaacctccgaaagcttatttatgggacagtgacagaagataatgaagaagaagatgatgatactctagaagagcttggagggttgtttcgtgtcaaccagcctgacagagagtgtaagcacaaggctgactctttggactgctccagatttcttgtggaggccccccatgactgggatttagaggaggttatgaacagtatcagagattgcttcgtgactggaaagtgggaagatgataaagatgcagccaaggtcttagcagaagatgaggagctctacggtgactttgaagacttggaaacaggggacgtgcacaagggaaaatcaggccccaatactcagaatgaagatatagagaaagaagttaaggaagaaattgaccctgacgaagaagaaagtgccaagaaaaagcatttggataagaagagaaaattgaaggagatgtttgatgcagaatatgatgaaggagaaagcacatattttgatgatcttaaaggagaaatgcagnaacaagcacag

SEQ ID NO: 433 - DNA, 492 bp, Homo sapiens
caatgccagtaaacttaaattacgtaacttcttgcaaccacgaaacctgtaatacgctgtacagtaacaagtgttggcattatcagttgaactgtaaatacaaaatgcttcttccaattagtctctatgatgattaagtttctaaaatttatctgaacaccattcagaaacttgttttggggaatttgatagttattgatgtgcatctgttaaactgatgacagacataactcatcattccccagaaaccttttttgattacagtatctaacattttgcctcctcttttttggttttgctggttataaaggtttggattggagagggctcactggatcccaatccttggagctggatcattggattcaaatcataatgtggataggatagggaggatgaattaccaggattcatggagcgggatcagattaccaggaacataggagtggattcctgccccaaccaaaccgcattcgtgtggatttttttatt

SEQ ID NO: 434 - DNA, 493 bp, Homo sapiens
ccatctgatctataaatgcggtggcatcgacaaaagaaccattgaaaaatttgagaaggaggctgctgagatgggaaagggctccttcaagtatgcctgggtcttggataaactgaaagctgagcgtgaacgtggtatcaccattgatatctccttgtggaaatttgagaccagcaagtactatgtgactatcattgatgcccaggacacagagactttatcaaaaacatgattacagggacatctcaggctgactgtgctgtcctgattgttgctgctggtgttggtgaatttgaagctggtatctccaagaatgggcagacccgagagcatgcccttctggcttacacactgggtgtgaaacaactaattgtcggtgttaacaaaatggattccactgagccaccctacagccagaagagatatgaggaaattgttaaggaagtcagcacttacattaagaaaattggctacaaccccgacacagtagcat

SEQ ID NO: 435 - DNA, 476 bp, Homo sapiens
ctgcagcctgggactgaccgggaggctctgattatttacccaccacaggtaggttgtgttctgaatctcaggttcacaggttaaggctacagcatcctcatcctccacggggttggagttgttgctggtgatgaagggtttgggtggctctgcatagactgtgatcgtcgtgactgtggtcctattgaggccagtgtctgagttatgggcttggcacgtataggatccactattattcacagtgatgttggggataaagagctcttgggtggattgctggaaagtcccattgacaaaccaagagtactgtgcaggtgggttagaggctgcgtggcaggagaggttcagattttcccctgatctgtaagatgtgtttagaggggaaatggtgggggcatccgggccatagaggacattcaggatgactgaatcactgcgcctggcactcactgggttctgggtttcacatttgtagc

SEQ ID NO: 436 - DNA, 300 bp, Homo sapiens
aaaacttaaggggaaagttggagattgagcataagggcccttgagtaagactgtgtcttatgctttcctttatccctctgtatacaggagacagaccaactagaagatgagaagtctgctttgcagaccgagattgccaacctgctgaaggagaaggaaaaactatagagttcatcctggcagctcaccgacctgcctgcaagatccctgatgacctgggcttcccagaagagatgtctgtggcttcccttgatctgactgggggcctgccagaggttgccaccccggagtctgaggagg

SEQ ID NO: 437 - DNA, 345 bp, Homo sapiens
ccaatgtggttggtcttcagcttgcagttagccaggttccataccttgaccagcttgtcccagccacaggagacgatgatagggttgctgctgttgggcgagaagcggacacaagacacccactctgagtggctctcatcctggacagtgtatttgcacacacccagggtattccatagcttgatggttttatctcgagatccagagacaatctgccggttgtcagaggagaaggccacactcagcacatccttggtatggcccacaaatcgcctcgtggtggtgcccgttgtgagatcccagaggcgcagggttccatcccaggagcctgagagggcaaactgg

SEQ ID NO: 438 - DNA, 512 bp, Homo sapiens
aaatgccatgatccaggatggattttagatcttgttgaaagcagccacatccatggactgcacatagtcctcaaaagcagtgatctgctcctccagcatatctgttccaactttatcatcttcaactacacactgtatttgaagtttcttaattccgtatcccactggaactagtttagatgagccccagactaagccgtctgcttgaatgcttctgacgcactcctctaatttcgccatatctgtctcatcatcccaaggtttcacatctagtaagatggaagacttggcaacaagtgcaggttttttggctttctttgattcatattgtgcaagacgttcttcccttagcctctttgcttcttcacttcctcctcatcatcagatccaaagaggtcaatgtcatcatcatctttactatctgtagctccacttcctgtagtgtcttccacatcggcaggaccatatttgcccaaagctttcttcactcctggcaggcttgaaaaacattt

SEQ ID NO: 439 - DNA, 483 bp, Homo sapiens
ccacagcccatgcgaaggcccgcatgagcaagactgtggacctgcaggatgcagaggaagctgtggagttggtccagtatgcttactttaagaaggttctggagaaggagaagaaacgtaagaagcgaagtgaggatgaatcagagacagaagatgaagaggagaaaagccaagaggaccaggagcagaagaggaagagaaggaagactcgccagccagatgccaaagatggggattcatacgacccctatgacttcagtgacacagaggaggaaatgcctcaagtacacactccaaagacggcagactcacaggagaccaaggaatcccagaaagtggagttgagtgaatccaggttgaaggcattcaaggtggccctcttggatgtgttccgggaagctcatgcgcagtcaatcggcatgaatcgcctcacagaatccatcaaccgggacagcgaagagcccttctcttcagttgagatcc

SEQ ID NO: 440 - DNA, 580 bp, Homo sapiens
  misc_feature 560: n = A,T,C or G
ccgggcaggtccaggttttagatattaacctggctgcagagccaaaagtgaaccgaggaaaagcaggtgtgaaacgatctgcagcggagatgtacggctcctcttttgacttggactatgactttcaacgggactattatgataggatgtacagttacccagcacgtgtacctcctcctcctcctattgctcgggctgtagtgccctcgaaacgtcagcgtgtatcaggaaacacttcacgaaggggcaaaagtggcttcaattctaagagtggacagcggggatcttccaagtctggaaagttgaaaggagatgaccttcaggccattaagaaggagctgacccagataaaacaaaaagtggattctctcctggaaaacctggaaaaaattgaaaaggaacagagcaaacaagcagtagagatgaagaatgataagtcagaagaggagcagagcagcagctccgtgaagaaagatgagactaatgtgaagatggagtctgaggggggtgcagatgactctgctgaggagggggacctactggatgatgatgataattgnagatcgggggggatgaccag

SEQ ID NO: 441 - DNA, 528 bp, Homo sapiens
  misc_feature 480: n = A,T,C or G
gtaaattaaattgtgtactgaagggaaaagtttgatcataccaaacatttcctaaactctctagttagatatctgacttgggagtattaaaaattgggtctatgacatattgtccaaaaggaatgctgttcttaaagcattatttacagtaggaactggggagtaaatctgttccctacagtttgctgctgagctggaagctgtgggggaaggagttgacaggtgggcccagtgaacttttccagtaaatgaagcaagcactgaataaaaacctcctgaactgggaacaaaaatctacaggcaagcaagatgcccacacaacaggcttattttctgtgaaggaaccaactgatctcccccacccttggattagagttcctgctctaccttacccacagataacacatgttgtttctacttgtaaatgtaaagtctttacctgcccgggcggccgcccgggcaggttggaggtggaggggnagatggtcagtaggacagaaggtaacattgatgactcgctcattggtg

SEQ ID NO: 442 - DNA, 364 bp, Homo sapiens
cgatggaggaggaggaggttgagacgttcgcctttcaggcagaaattgcccagttgatgtcattgatcatcaatactttctactcgaacaaagagatctttctgagagagctcatttcaaattcatcagatgcattggacaaaatccggtatgaaagcttgacagatcccagtaaattagactctgggaaagagctgcatattaaccttataccgaacaaacaagatcgaactctcactattgtggatactggaattggaatgaccaaggctgacttgatcaataaccttggtactatcgccaagtctgggaccaaagcgttcatggaagctttgcaggctggtgcagatatctctatgattgg

SEQ ID NO: 443 - DNA, 589 bp, Homo sapiens
  misc_feature 541: n = A,T,C or G
ctgcctttgaagcacctcctcagtacgttttgccaacctatgaaatggccgtgaaaatgcctgaaaaagaaccaccacctccttacttacctgcctgaagaaattctgcctttgacaataaatcctataccagctttttgtttgtttatgttacagaatgctgcaattcagggctcttcaaacttgtttgatataaaatatgttgtcttttgtttaagcatttattttcaaacactaaggagctttttgacatctgttaaacgtctttttgtttttttgttaagtcttttacattttaatagtttttgaagacaatctaggttaagcaagagcaaagtgccattgtttgcctttaattggggggtgggaagggaaagagggtacttgccacatagtttcctttttaactgcactttctttatataatcgtttgcattttgttacttgctaccctgagtactttcaggaagactgacttaaatattcggggtgagtaagtagttgggtataagatctgaacttttcatctgcagaggcaagnaaaaatatttgacattgtgacttgactgtggaagatgatggttgcatg

SEQ ID NO: 444 - DNA, 510 bp, Homo sapiens
cctcatctcagagctgggtgccaggctgaaggatcactgaggaaggggaagtgggcaaagcagaccctcaaactgacacaagacctacagagaaaaccctttgccaaatctgctctcagcaagtggacagtgataccgtttacagcttaacacctttgtgaatcccacgccattttcctaacccagcagagactgttaatggccccttaccctgggtgaagcacttacccttggaacagaactctaaaaagtatgcaaaatcttccttgtacagggtggtgagccgcctgccagtggaggacagcacccctcagcaccacccaccctcattcagagcacaccgtgagcccccgtcggccattctgtggtgttttaatattgcgatggtttatgggacgttttaagtgttgttcttgtgtttgttttcctttgactttctgagtttttcacatgcattaacttgcggtatttttctgttaaaatgttaaccgtccttcccctagcaaattt

SEQ ID NO: 445 - DNA, 326 bp, Homo sapiens
gaagacatctttgaaggtcatgagtttgttagtttaacatcatatatttgtaatagtgaaacctgtactcaaaatataagcagcttgaaactggctttaccaatcttgaaatttgaccacaagtgtcttatatatgcagatctaatgtaaaatccagaacttggactccatcgttaaaattatttatgtgtaacattcaaatgtgtgcattaaatatgcttccacagtaaaatctgaaaaactgatttgtgattgaaagctgcctttctatttacttgagtcttgtacatacatacttttttatgagctatgaaataaaacatttt

SEQ ID NO: 446 - DNA, 494 bp, Homo sapiens
ccaaatggtgaaaccctatctctactaaaaatataaatattagccttgtgtgggggcgcacacgtgtagtctcagccactagggaggctgaggcaggagaatcacttgaacccaggaggcggaggttgcagcgagccaagatcgtgccattgcacttcagcttgggtgacagagcaagactctgtctcaaaaaaaaaacaaagtcttatgacctctttggcatgtactttagagaggaaatcttacccaagccagaaagtctcagtctaggcattttttttattgtgcaagcatataaaattctagtaattctggggctaatcctgtgatagggagaattcaaggaaaggtggtggtgacccagtgctgccgttttctccttaggtgacgcatccaaagaagacattgacactgctatgaaattaggagccggttaccccatgggcccatttgagcttctagattatgtcggactggatactacgaagttcatc

SEQ ID NO: 447 - DNA, 322 bp, Homo sapiens
ctgactaagagccctctggcacaaatggaagaagaaagaagggagcatgtagctaaaatgaagaagatggagatggagatggagcaggtgtttgagatgaaggtcaaagaaaaagttcaaaaactgaaggactctgaagctgagctccagcggcgccatgagcaaatgaaaaagaatttggaagcacagcacaaagaattggaggaaaaacgtcgtcagttcgaggatgagaaagcaaactgggaagctcaacaacgtattttagaacaacagaactcttcaagaaccttggaaaagaacaagaagaaagggaagatctttt

SEQ ID NO: 448 - DNA, 237 bp, Homo sapiens
ctgcattgttgtggaattcacaactactcagactgggaaaatacagattggttcaaagaaaccaaaaaccagagtgtccctcttagctgctgcagagagactgccagcaattgtaatggcagcctggcccacccttccgacctctatgctgaggggtgtgaggctctagttgtgaagaagctacaagaaatcatgatgcatgtgatctgggccgcactggcatttgcagctattcag

SEQ ID NO: 449 - DNA, 339 bp, Homo sapiens
aggacgacaagaagaagaaggacgctggaaagtcggccaagaaagacaaaggcccagtggacaaatccgggggcaaggccaaaaagaagaagtggtccaaaggcaaagttcgggacaagctcaataacttagtcttgtttgacaaagctacctatgataaactctgtaaggaagttcccaactataaacttataaccccagggcaacagggaggaccagatcaacaggcttattagaagaatgaactaaggtgtctaccatgattatttttctaagctggttggttaataaacagtacctgctctcaaattgaaaaaaaaaaaaaaaaaaaaaaaaaaa

SEQ ID NO: 450 - DNA, 509 bp, Homo sapiens
  misc_feature 501: n = A,T,C or G
gtgagacacaggtatgtatttttgggtctcacaggttaaggtctgagccactgaggtcaggctctggtttgtatcccaagaccgagaagctgtgttaagcatggtgggtagagtttgtcaggtgacatctatgaaaccaggagcatgcaaagataggttgaccggaacagccatggtcaaaccaattaaactgtcctgcagttgaggtcaggcacaggtagaacggatctatcaggtgaggcccaaggagtccggattaggctcatctagaaagacctggatgtggtagatgacctctgaggatatgaagtgaaggcaggtggatagagccaggtctctcaggaggtctgaggagctgggatctggcacagtgagcaggtctggatttcccaggtggtgtcaagacagatgggtaggccaggcacagtggctcacacctataatcccagcaattttggaaggccaaggcaggcagatcagttgaagtcaagagctcgagancagcctgg

SEQ ID NO: 451 - DNA, 229 bp, Homo sapiens
  misc_feature 63, 166: n = A,T,C or G
aaaaaaggaattctgtgtcaagtataactcaaaataaatacaaattcacaagtagaactattnaatacttcatatggggtaaacaccattatctcccaactagatcgctagatctaccaactgcaagcgattgtcccttttgaacgtactaaaaccacacactttnccatcccctgggctcctggccctctgagcactcaattctcaatggcacctggcctgcatggca

SEQ ID NO: 452 - DNA, 595 bp, Homo sapiens
aaagaacaaactcaacatatcagcagcaaatttcagttaaactaaattggaaaccaatgttctgtgtaaccaaagtgcaaagtcagttccccagctcagaaagaaaattaagagtataaactgaaggcttaagagaacttcagagagcacactgtgtgattaatacataaatattaaaaattatccaatttttgatttaagaacaacacagtttggatctagtcattaaaacatatgcacaggtgtcaaaggcaagtaacactaccacctaaggttattcggaggaactgtgaagatgtagcacggacctctaaggtgtctaaaatcccttctgatggaaaggttatggaacactatctgccaaaaacactgaaagcaccacttttatatttagatccaatgctgagtgatatagtcactgttgggataggtttttatttgggaaaatggagaggattctcaaaacagattcatggcttgcatgcagtgacaccctatcaagagcctggaaagacaccatgaaatcacctcaactcaagtggtgggcccacctactcatagtcagtgttacactagccagctctagggctctgac

SEQ ID NO: 453 - DNA, 299 bp, Homo sapiens
aaaggccaagaaggcagtgttgaaaggtgtccacagccacaaaaagaagaagatccgcacgtcacccaccttccggcggccgaagacactgcgactccggagacagcccaaatatcctcggaagagcgctcccaggagaaacaagcttgaccactatgctatcatcaagtttccgctgaccactgagtctgccatgaagaagatagaagacaacaacacacttgtgttcattgtggatgttaaagccaacaagcaccagattaaacaggctgtgaagaagctgtatgacattgatgtgg

SEQ ID NO: 454 - DNA, 510 bp, Homo sapiens
  misc_feature 414: n = A,T,C or G
aaaaaggatttaggccactgcctttttctgagggaggagcggccagcatgtgccccgcggctcactgggcctgtctaatcacacagcagtggcaaaaggagtatctgccagacgcttcctatcactctattctgtctcctcatccacctgaagttcactccgtttccccaatgacttagaatggctttgtgcttagttttaattgtagtttgtgctattctgtgaattaacaattcaaacaaaataagaaagccatgttgttaaacagtagaggagccagggactctgtctccattctctcatcacacacaagtcatgcatctaccaaaaaaaaaaaaaacaaaaaaacacaacaacaaaaaaactgtcctctgaggaggcacaggtgtgacagataaggaacctgcagctcanattcaacaggcacctgccaagtccacactcaggactgtgacagcctcaacaacatgaggtccagacacattcactgtggaaggctctgcccacgcg

SEQ ID NO: 455 - DNA, 309 bp, Homo sapiens; identical to SEQ ID NO: 400

SEQ ID NO: 456 - DNA, 485 bp, Homo sapiens
gtggttgtgtggtcgtgtctcggaaaccggtagcgcttgcagcatggctgaccaactgactgaagagcagattgcagaattcaaagaagctttttcactatttgacaaagatggtgatggaactataacaacaaaggaattgggaactgtaatgagatctcttgggcagaatcccacagaagcagagttacaggacatgattaatgaagtagatgctgatggtaatggcacaattgacttccctgaatttctgacaatgatggcaagaaaaatgaaagacacagacagtgaagaagaaattagagaagcattccgtgtgtttgataaggatggcaatggctatattagtgctgcagaacttcgccatgtgatgacaaaccttggagagaagttaacagatgaagaagttgatgaaatgatcagggaagcagatattgatggtgatggtcaagtaaactatgaagagtttgtacaaatgatgacag

SEQ ID NO: 457 - DNA, 311 bp, Homo sapiens
ccacagggacctctgcagtgccccctaagtgacccggacacttccgagggggtcatcaccgcctgtgtatataacgtttccggtattactctgctacacgtagccttttacttttggggttttgtttttgttctgaactttcctgttaccttttcagggctgacgtcacatgtaggtggcgtgtatgagtggagacgggcctgggtcttggggactggagggcaggggtccttctgccctggggtcccagggtgctctgcctgctcagccaggcctctcctgggagccactcgcccagagactcagcttgg

SEQ ID NO: 458 - DNA, 659 bp, Homo sapiens
  misc_feature 537, 573, 576, 637, 646: n = A,T,C or G
aaatatcacaagtaggtcttaagtgtcatctggcatcttctttctgtagccaggtaactcttagatcttattcatcagcctgctgaacagttcctttttcagagacatagataccatccaaaaatttcctgatatccttgtttttaactgttgtggcttgctgaatcaaagccgctgaatttgaaacaagctcaatgtcatttccttcaaggattaattcatctttctgggcttgagatactgaacaagcaacacctggtctcatccgaaccctgcggatgtatttttcacccaagaaatttcggatttcaacaagagacccattctcctggataacaacgttgatggggaagtgagcatacacagacctcatcttgtaacggaagcccagtgtaacacccttgatcatgttctgtacatgactacaaatagtccgaacggtagccagttcctttctgttaccccaccatttgtcaacccggagcctcttttttttctttccaagaaggctgagttctacattgatgtgattgaagnccctccgcagggttcctctgggggcccttcacgatnacntgtgcgtcccttcagagtaatgtcgacattttctgggaatgtcgacagtctgattgctganaatagtctncattctcgacctc

SEQ ID NO: 459 - DNA, 461 bp, Homo sapiens
cctccctgggaagtggagggggccaggccacgaccaggcagaaatccaccaaaacaggagggccaccgacatacaaacgcaggacacagaaacaacatgggccccattccaaaggatgacctcaatgaaagaccagcaaaatctacctgtgacagtgagaacttggcagtcatcaacaagtcttccaggagggttgaccaagagaaatgcactgtacggaggcaggatcctcaagtagtatctcctttctcccgaggcaaacagaaccatgtgctaaagaatgtggaaacgcacacaggttctctaattgaacaactaacaacagaaaaatacgagtgcatggtgtgctgtgaattggttcgtgtcacggccccagtgtggagttgtcagagctgttaccatgtgtttcatttgaactgcataaagaaatgggcaaggtctccagcatctcaagcagatgg

SEQ ID NO: 460 - DNA, 584 bp, Homo sapiens
  misc_feature 530: n = A,T,C or G
gccgttggtcctgtgcggtcacttagccaagatgcctgaggaaacccagacccaagaccaaccgatggaggaggaggaggttgagacgttcgcctttcaggcagaaattgcccagttgatgtcattgatcatcaatactttctactcgaacaaagagatctttctgagagagctcatttcaaattcatcagatgcattggacaaaatccggtatgaaagcttgacagatcccagtaaattagactctgggaaagagctgcatattaaccttataccgaacaaacaagatcgaactctcactattgtggatactggaattggaatgaccaaggctgacttgatcaataaccttggtactatcgccaagtctgggaccaaagcgttcatggaagctttgcaggctggtgcagatatctctatgattgggaccccgcctgcctgtcctgtgcccaccacgcagcagtcaggggagaaaatggtggctatcccttctgcttagagaaagaaatggcctttagctggtttcatgnttgtgttttgactggagggagtagaccctatctataaggtgccccccatcatcc

SEQ ID NO: 461 - DNA, 471 bp, Homo sapiens
  misc_feature 421, 430, 455: n = A,T,C or G
cctgacattcctgccttcttatattaataagaaaaataaaacaaaatggtgttgaagtgttggggcggcgaaaatttttggggggtggtatggagagagaatgggtgatgtttctcagggctgcttcaagtgggattggggcggcgtgggaacataaagtgggagagattaagctgaagggaagtcttgtggtaagggatgatattgtggggatgttagaagaaacatttgtcatatagaatgattggtgatggcctggatacagttttggatgaactgagaagctaaatggaagatacaaggtctgaataaaaggaggagaaaaatgggtattaaaggactaagaattgggaggacccaggacatccaattagagagtgcccaagggggttcagcgtaattacttgcttggttggcaagnttttgggcnctatccttgagtttttttatgttgncatacaccaggccaga

SEQ ID NO: 462 - DNA, 315 bp, Homo sapiens
ctgctgcagcagcggcactacaagccaaatcagatgagaaggcggcggttgcaggcaagaagcctgtggtaggtaagaaaggaaagaaggctgctgttggtgttaagaagcagaagaagcctctggtgggaaaaaaggcagcagctaccaagaaaccagcccctgaaaagaagcctgcagagaagaaacctactacagaggagaagaagcctgctgcataaactcttaaatttgattattccataaaggtcaaatcattttggacagcttcttttgaataaagacctgattatacaggcagtgaaaaaaaaaaaa

SEQ ID NO: 463 - DNA, 174 bp, Homo sapiens
aaagagtgggctgcaccccccacacgccatttacatcagcttcataaacacttttcttcctccctgtaacttaaccttttttcccttttatgaagttgagaggctttatgaaataagtttgcattgcacatccgtgcagaaatctttctgactttgaaatttttaggacgtcag

SEQ ID NO: 464 - DNA, 329 bp, Homo sapiens
ccatcttccacaagtactccggcagggagggtgacaagcacaccctgagcaagaaggagctgaaggagctgatccagaaggagctcaccattggctcgaagctgcaggatgctgaaattgcaaggctgatggaagacttggaccggaacaaggaccaggaggtgaacttccaggagtatgtcaccttcctgggggccttggctttgatctacaatgaagccctcaagggctgaaaataaatagggaagatggagacaccctctgggggtcctctctgagtcaaatccagtggtgggtaattgtacaataaattttttttggtcaaattt

SEQ ID NO: 465 - DNA, 384 bp, Homo sapiens
  misc_feature 167: n = A,T,C or G
ttctggggtaggaagtggtcccgggagattttggatggaaaagtcaggaggattgacagcagacttgcagaattacatagagaaattaggaacccccaaatttcatgtcaattgatctattccccctctttgtttcttggggcatttttccttttttttttttttgnttttttttacccctccttagctttatgcgctcagaaaccaaattaaaccccccccccatgtaacaggggggcagtgacaaaagcaagaacgcacgaagccagcctggagaccaccacgtcctgccccccgccatttatcgccctgattggattttgtttttcatctgtccctgttgcttgggttgagttgagggtggagcctcctggggggcactgg

SEQ ID NO: 466 - DNA, 380 bp, Homo sapiens
ctgctttatttggagaaataccgacctaagatgcgattacgcttcagagataccaatgggcattgctgtgttcagtagaaggaaatgtaaacgaaggctgacttgattgtgccatttagagggaactcttggtacctggaaatgtgaatctggaatattacctgtgtcatcaaagtagtgatggattcagtactcctcaaccactctcctaatgattggaacaaaagcaaacaaaaaagaaatctctctataaaatgaataaaatgtttaagaaaagagaaagagaaaaggaattaattcagtgaaggatgattttgctcctagttttggagtttgaatttctgccaggattgaattattttgaaatctcctgtcttttt

SEQ ID NO: 467 - DNA, 250 bp, Homo sapiens
cgcgactggtaccagaagcagaggcctgggccctcccgcgactacagccactactacacgaccatccaggacctgcgggacaagattcttggtgccaccattgagaactccaggattgtcctgcagatcgacaacgcccgtctggctgcagatgacttccgaaccaagtttgagacggaacaggctctgcgcatgagcgtggaggccgacatcaacggcctgcgcagggtgctggatgagctgaccctgg

SEQ ID NO: 468 - DNA, 274 bp, Homo sapiens
aaatacagagagtcttagtttggactgaaagagaaaaattgctctgatctttctaaagcttgaacattaaggcttctttgcaattttcttagagctctttgatcgttaattatatctttccatcgaagagaagcagatttcttctgagatttctgaacagttcctgggtgtttccggttctgcttcagtgtaccatcactttgccttgcctcagtctctccttcctccggggccacagaaggagaaagcccaaagcatacccatcctgcccttt

SEQ ID NO: 469 - DNA, 168 bp, Homo sapiens
ccagtccacagttgtagcctgacttcagtgagttctgatgtgtgctttttgcaaatacatgttctcagaacagtgagatcatccagcagtggcctggattgcactcacataaaaatcatgagacagccatggctacttgtttctgtaatacatgcatgtgtgtttttt

SEQ ID NO: 470 - DNA, 411 bp, Homo sapiens
ctggctagtggcttattacttgtgactggacctctggtcctcaatcgagttcctctacgaagaacacaccagaaatttgtcattgccacttcaaccaaaatcgatatcagcaatgtaaaaatcccaaaacatcttactgatgcttacttcaagaagaagaagctgcggaagcccagacaccaggaaggtgagatcttcgacacagaaaaagagaaatatgagattacggagcagcgcaagattgatcagaaagctgtggactcacaaattttaccaaaaatcaaagctattcctcagctccagggctacctgcgatctgtgtttgctctgacgaatggaatttatcctcacaaattggtgttctaaatgtcttaagaacctaattaaatagctgactacaaaaaaaaaaaa

SEQ ID NO: 471 - DNA, 628 bp, Homo sapiens
  misc_feature 495, 569: n = A,T,C or G
ctgaggagactccggcgctcgccatggccgacgaaaagcccaaggaaggagtcaagactgagaacaacgatcatattaatttgaaggtggcggggcaggatggttctgtggtgcagtttaagattaagaggcatacaccacttagtaaactaatgaaagcctattgtgaacgacagggattgtcaatgaggcagatcagattccgatttgacgggcaaccaatcaatgaaacagacacacctgcacagttggaaatggaggatgaagatacaattgatgtgttccaacagcagacgggaggtgtctactgaaaagggaacctgcttctttactccagaactctgttctttaaagaccaagattacattctcaattagaaaactgcaatttggctccaccacatcctgactactaccgtatagttttctctattctttcatttcccccttccccattcctttattgtacataaagtaactggtatatgtgcacaangcatattgcattttttttttactaaacagccaatggtatgttttgattgacatcaagtggagacgggatggggnaaaatactgattctgtgaaatacccccttttctccattagtggcatgctcattcagctc

SEQ ID NO: 472 - DNA, 385 bp, Homo sapiens
aaatgagaatacgagaatacccagaattttattcccagcctttgtgtggaaaaggcagtttgcattcttaggaaacatctaactgttacctaaaccataaatatttctatctactccattcaacccaattaaagaaaacaaaatgatgagaaaaataggagccgaacagaaagaaaattcacatcattttctactattacgaacattcaaatggtgcttcaaattaaatacttttaattatcattctagccaggatcatactaagtaggatctcatgacagtcacatatgcagcgacttcacctaaaccgtggcactgaatgctctgccatgagccgcaagcagcacagtgatcatcacccacaaggacaggttgctgggatgag

SEQ ID NO: 473 - DNA, 464 bp, Homo sapiens
aaatatattaaatatttcactgaaatacatggttcaccatcctcccccacccccacagtggttacattataaaaccaaagcccacggcctcccacctcctgactcctctaccaactgggtgaggaaagggacaatggtagcccaggggaagggcatggctggcactgtggtacggggatccagggtgtggacaggccctcccacctggcaagaagcagagacaagccacccaaggctgaggtcttcccactctgatctacttataccctcacccctaccccatggcaccaagtagtctcttcctatcccttcctatccagggatatggctggggacaggggagtagattttctgtctggaaaacaagtcttttcccctccttctgccatgactaatgaagtacctgatggcccatttggttgatgtatgaagatgcccaagggaggcattacccagaaaccagg

SEQ ID NO: 474 - DNA, 449 bp, Homo sapiens
ccgggcaggtgttcggactatttgtagtcatgtacagaacatgatcaagggtgttacactgggcttccgttacaagatgaggtctgtgtatgctcacttccccatcaacgttgttatccaggagaatgggtctcttgttgaaatccgaaatttcttgggtgaaaaatacatccgcagggttcggatgagaccaggtgttgcttgttcagtatctcaagcccagaaagatgaattaatccttgaaggaaatgacattgagcttgtttcaaattcagcggctttgattcagcaagccacaacagttaaaaacaaggatatcaggaaatttttggatggtatctatgtctctgaaaaaggaactgttcagcaggctgatgaataagatctaagagttacctggctacagaaagaagatgccagatgacacttaagacctacttgtgatattt

SEQ ID NO: 475 - DNA, 413 bp, Homo sapiens
  misc_feature 317, 383, 402: n = A,T,C or G
ctgtcaccattctcacgtgattcttgtgagactctttttggttataattactatttaatatttagactattttactgagcagactttataaatgagatatctacaaggcacttaaagtgttacagatgttttaccttaagaattatttaagttgtgttgggttaagacagttttcagtgtaccgtaaatgttgtgttttcagaaaaagacaaaacgatggtgctgactggttttctgtatattgcacaacagccctcaaatacactgatgtatgaaactattcatacatcaagcagcatttttttcactctccttanaattggaactatgcagttaaggcagataaaatgtacagatgtttcatatattacagggtacatatntaaatcaaaatttcctatntaaaactgatt

SEQ ID NO: 476 - DNA, 316 bp, Homo sapiens
aaaaagtcaccctacttagaaatcttctgtgggggtgggagggacaaaagattacaaaccaaaactcaggagatggtaacactggaattgataaaatcacctgggattagttgtataactctgaaccaccaaacctctgctatcaagccttgctacagtcatggctgtccagaaagatttacagttatttttctgagaaaggatccatgggctttaagaacttcagaactttaagaacttcagaagttcttaagttgctgaagctcaagtaacgaagttgaatgcaatcaaaaaaagaataccagggagtcaaggc

SEQ ID NO: 477 - DNA, 154 bp, Homo sapiens
ctgctgcccgtgctggtgccattgccccatgtgaagtcactgtgccagcccagaacactggtctcgggcccgagaagacctcctttttccaggctttaggtatcaccactaaaatctccaggggcaccattgaaatcctgggtgtccgcaatgt

SEQ ID NO: 478 - DNA, 496 bp, Homo sapiens
ctgaatcttagcggctacagaaagaatctccagaaatcagatctctctactttagttagaagatgccccaatcttgtccatctagacttaagtgatagtgtcatgctaaagaatgactgctttcaggaatttttccagctcaactacctccaacacctatcactcagtcggtgctatgatataatacctgaaactttacttgaacttggagaaattcccacactaaaaacactacaagtttttggaatcgtgccagatggtacccttcaactgttaaaggaagcccttcctcatctacagattaattgctcccatttcaccaccattgccaggccaactattggcaacaaaaagaaccaggagatatggggcatcaaatgccgactgacactgcaaaagcccagttgtctatgaagtatttattgcaggatggtgtctcttctttagaacagggaaaataggcaggaagcccaattgctggagtacttagctagtt

SEQ ID NO: 479 - DNA, 521 bp, Homo sapiens
aaaaagttgtatttatagccccagtaaccggaaagaattataagtaattatggaagtattatattctgaccataccaagagttaaaaacaaagagttcctactaaagaggaatattttcaagatgatctggtcacatcatgtgcatagttaagattgtttgttttaataaagattcttttgcaaataaagaaataaaatttagtaaagttattcttctcttgatgaaaaaaccttaaaaatgaaccactggtggtttaagaaggggggaaaaaagagtaagctacatattgaagttctagaatgcagcacctcaacttcacatcttccataagcatttaagattaagaaatccaagtgatgtcttgacgatcgaatcacactttatagttcttccaattccaatgtctgactttagcatctcatgtcaattaaaagttccctaatacaaaatattgtgctaaagagtgctaagattctgcatgctgctgccattccctggtcccgttcatgcttgtagctg

SEQ ID NO: 480 - DNA, 381 bp, Homo sapiens
  misc_feature 3, 24, 245, 251, 277, 284, 305, 309: n = A,T,C or G
gtngaccggggcgcgggctccatncgggaagccggtggggccttcggaaagagagagcaggctgaagaggaacgatatttccgagcacagagtagagaacaactggcagctttgaaaaaacaccatgaagaagaaatcgttcatcataagaaggagattgagcgtctgcagaaagaaattgagcgccataagcagaagatcaaaatgctaaaacatgatgattaagtgcacaccgtgtgccatanaatggnacatgtcattgcccacttctgtgtanacatggntctggtttaactaatatttgnctgngtgctactaacagattataataaattgtcatcagcgaaaaaaaaaaaaaaaaaaaaaaaagcttgacctgcc

SEQ ID NO: 481 - DNA, 419 bp, Homo sapiens
cctttatttatctagctcaaagtagacactatcacaatcttgtttgttactccttttactaaaatagttcaaatcaatgtttttaccacactatcaaaaagttctatttcttcttgtctccccacgtcagagtggttgaatagaaggtagaaacaggccgggagtccacgggctcccagctctaaacggcgccagggcaggaaggggtggctccaggtctcactgtggcaccttctacagaaaatagacgtagctgccgggcccggggacagaaaccagacgttccagtccatctccaaaaagcagcacaaatactttgccccacagtatgaaaaatatacacctctaccgctctgcagtcatgcatttagttttaagaaaaaaaaaatcagtagtatgtatcttgtttcctcaagttt

SEQ ID NO: 482 - DNA, 314 bp, Homo sapiens
ctatcttcctgggtagatgccctggtgtagggctgagtactgaatggtcttccatccccagcaagggggtgcagcccagggtcaggcccttcagagccagggcagaggacgcacggtggctagagccgctgcactatccttttcagagcacttcatccacttgctcctccctctaccctcggcaccctgggtgggaaagggttgatgctcatcatttattgaggggaagccacttaataaggagtcagacctaaaagggggtgggggacattttcttacctcacccaagaaagaggtcgtcacttttgctgtgg

SEQ ID NO: 483 - DNA, 470 bp, Homo sapiens
  misc_feature 418: n = A,T,C or G
cttggctaatttttgtattattagtagagacggggtttcagcatgttggctaggccggtctctcctgacctcagggtgatcagcccacctcggcctcacaaagtgctgggattacaggcgtgagccaccttgcccagcccacatcatacagtttgaaatgaaactttgccacaaccagcctttgctgtagcacacacatatatcactgaacctgtttgaaataaagttttttttctttttcatgattcgtctttgagtacctccaggctgaaagactgttgtaccagtaaaaacttaaaggcacaaattctccttgaagaccttctcccttttatgtggccccatattttatgttgctttatctttgaaattttgcatgaaaaggaaatgaatggattcgaatgaaattgtcctttanagcatgattacttgttcccatggacaaatatttttctccccttgctcttcct

SEQ ID NO: 484 - DNA, 252 bp, Homo sapiens
ctggagcagcagcagtggagggggcaggacctcctgctggtgcagcaccagcctaaatgctccacttaaaagatacagaactgcagaatgggtaagaactcaccaaccaatcatctgctgccttcagaagactcacctagcacataaggactcaaataaacttaaagtaaaggggtggaaaaaggcatttcatgcaaatggacaccaaaagtgagcaggggtagctatccttacatcagacaagcaaacttt

SEQ ID NO: 485 - DNA, 520 bp, Homo sapiens
aaaagaagaaatcatgcaagaaaacaaagggaacaaaaaatctgccagcgttatgatcagctcatggaggcatgggagaaaaaagtggacagaatagaaaataatcctcggaggaaagctaaagaaagcaaaacaagggaatactatgaaaagcagtttccagaaattcgaaaacaaagagaacagcaagaaagatttcagcgagttgggcagaggggagctggtctttcagccaccattgctaggagtgagcatgagatttctgaaattattgatgggctctctgagcaggagaataatgagaaacaaatgcggcagctctctgtgattccacctatgatgtttgatgcagaacaaagacgagtcaagttcattaacatgaatgggcttatggaggaccctatgaaagtgtataaagataggcagtttatgaatgtttggactgaccatgaaaaggagatctttaaggacaagtttatccagcatccaaaaaactttggactaattgcatcatacttgg

SEQ ID NO: 486 - DNA, 568 bp, Homo sapiens
  misc_feature 433, 475: n = A,T,C or G
ccttgctatgaagcagtgtgtgaatggacaatgttgaatgaatgtctggctcagtgatggagagccaggttcatctttgaaatctagggctcttcactcatgaagcagactcctagtcctggagtgactgtgtacgagagcgtggttgtggtgctgtatgtgaacgcatgcaagcttgattcaccttcagggggctgataacctagtaaatcatcaaaatgagatcataagtgttaatgtacactggacatgaaaacaaagactggtttagcagcagacattggtttactctgcagcctgtgttttctgtttccccctttcccacctccttccccccacccaatccttttttttttcttttttgcttttcttttcttttttttagtttttatttactttacctagtatgcctttttttagttgcttctcaagncagaaaacttttcaggaaggtttccctgtgcatttgcaccanatgaatgtttgatgctatgaaaagctttccatatcatcaaaactaatttgtgtagatttttgcatgaaaaaaatcataaatttccctcaaaat

SEQ ID NO: 487 - DNA, 379 bp, Homo sapiens
ctgcagcctgggactgaccgggaggctctgaccatttacccaccacaggtaggttgtgttctgaacctcaggttcacaggtgaaggccacagcatccttgtcctccacggggttggagttgttgctggagatggagggcttgggcagctccgggtatacatggaactgtccggttgcttcttcattcacaagatctgactttatgacttgtagggtatagaatcctgtgtcattctgggtgacgttctggatcagcagggatgcattggggtatattgtctctcgaccactgtatgcgggccctggggtagcttgttgagttcctattacatatcctacaattagactgttgccatccactctttcgcctttgtaccag

SEQ ID NO: 488 - DNA, 475 bp, Homo sapiens
  misc_feature 361: n = A,T,C or G
ctgtcaggggcggcgtgcctggtgatgcggcatcttaccttcatccccatctcagaatgggcagccagtctcagattcaaggaggaggaatcctgaggtgtggcgttcagtcctgaggtagacctgaggtcccctggaaattgtgttgatgctgagatggatgaggggtgctcattctctcaggtagacagtgaggagtcctggttcagccgagcctccatgtctgcatggatggttatgaccctgattgtttttggaaacagccaagctctctaggtgtactcagcaaatgcaaggtatagtgggtcctgcatacccagggtattatttgagccatggaagcaaaacagagactgcttancctccctaagagtagttggtgggagaggccagcaaccatggaggcaggagcagctcctctttgcctctgagtagtccccacatgttcccccttccagagatttcaactgccagg

SEQ ID NO: 489 - DNA, 342 bp, Homo sapiens
  misc_feature 324: n = A,T,C or G
ctggcccttgaagtccaggtcgatggtgaagtccaggtcccggttgttcttggcgttgggccgcatgccgatggtgccgaagatctcctcgcccgtcttcacggtcaggtagtcctccatgtagaacaccgtctgcttccagtgcgtgtacggggactcggggctggtggagaagccggtcctcttgtggcagcgtgtgaactcgatgttgaagtaggccaccagggcgtgcacgtagtcattccgcttcacttgcaggcagaacggggaggtgaaggtcaggtcttccaccttgacggtatagatgtccacctcctttatgangcaggcgttggtgaccag

SEQ ID NO: 490 - DNA, 428 bp, Homo sapiens
ccatagctgaagctgtggggccagttgatacctgctggcaggaaatggctgttttttaggtttgtatttatgtgccgccacttttgtaaggcctgggagatcccagggtcctccaccctccccctgaccacatacaaaggcactctagttcaagagtgaaaaatctcacccaggaggaacagccctccttgaagcaatggcagggccagcagggaggtgggcatggcagggaatggagagagtgagccagacagacttcacctccttactggacacagggtcaagggcgagtttcaattgctgctccctttactttctctacctgtgactactccctggaccaatcctgaggagggcacattttccagaagccacgtgataggggctggtttctgtggagccagaggcagagacactgaacttgagct

SEQ ID NO: 491 - DNA, 450 bp, Homo sapiens
ctttgacttggactatgactttcaacgggactattatgataggatgtacagttacccagcacgtgtacctcctcctcctcctattgctcgggctgtagtgccctcgaaacgtcagcgtgtatcaggaaacacttcacgagggggcaaaagtggcttcaattctaagagtggacagcggggatcttccaagtctggaaagttgaaaggagatgaccttcaggccattaagaaggagctgacccagataaaacaaaaagtggattctctcctggaaaacctggaaaaaattgaaaaggaacagagcaaacaagcagtagagatgaagaatgataagtcagaagaggagcagagcagcagctccgtgaagaaagatgagactaatgtgaagatggagtctgaggggggtgcagatgactctgctgaggagggggacctactggatgatgatga

SEQ ID NO: 492 - DNA, 431 bp, Homo sapiens
ccagagggctgtgctgaagtttgctgctgccactggagccactccaattgctggccgcttcactcctggaaccttcactaaccagatccaggcagccttccgggagccacggcttcttgtggttactgaccccagggctgaccaccagcctctcacggaggcatcttatgttaacctacctaccattgcgctgtgtaacacagattctcctctgcgctatgtggacattgccatcccatgcaacaacaagggggctcactcagtgggtttgatgtggtggatgctggctcgggaagttctgcgcatgcgtggcaccatttcccgtgaacacccatgggaggtcatgcctgatctgtacttctacagagatcctgaagagattgaaaaagaagagcaggctgctgctgagaaggcagtgaccaaggaggaat

SEQ ID NO: 493 - DNA, 471 bp, Homo sapiens
  misc_feature 457: n = A,T,C or G
cccagctaattttgtatttttaatagagacggggtttctccatgttggtcaggctgttcttgaactcctgacctcaggtgatctgcctgcctcggcctctcaaagtgctgggattacaggcatgagccgccatgcccagcccaacatactcaattatttgctgcctgttctttcatcccttccagcaacatgccatagaactagagatgataaaacaacacttgtttgtttctatgtcatgacgtgggtcctatgattctattgattagtattcacagcattcaattattcaaaaaccaaggaagagcttttcataggtctaataaaaaagaaatagaggcagaaagaaatgggggcaggtaaaccttattgcttggactgacacacattttagactttcacattactccagactcaaaaaaggtaaaccaaaatgttcttagaacttcattattgnttaatcattgacag

SEQ ID NO: 494 - DNA, 370 bp, Homo sapiens
aaagttgctttgctggaagtttttataaggaatctcaaattaaacttttagaagtttaattgacactaggaagccaaaccaaggctgacttcagactttgtttgtagtacctgtgggtttattacctatgggtttatatcctcaaatacgacattctagtcaaagtcttggtaatataaccaatgttttcaaatgtattctgttatacaaagagcagatttttattgaacttgtgcaataactatattaccatacaatataaatattcatgaatagtttcccaagtctggagcgaccacatagggagaaaatgtaaatgtctcaatttttgttcacaaaagtatattttatcaaattgctgtaagctgtg

SEQ ID NO: 495 - DNA, 366 bp, Homo sapiens
ctgatctggttgaaggcggtgtggtcgtaaattggctttgtccagtaagtacagggtatggggataggggtaaggatagccttcctggaatcctgtgtcatttttcacatcataaatattgcattcatgaagatcgatgatgggtgatatggggtagaaggtctctagaacatgattcttagtagcttcaatctcctctctggaggcgatggtgggcagaggatccttagtgctcagtcgggctccaccagaaccacggacttgaaggagaagagactctcggttccaggtagcagaaaacgtggagttttggacacagatcctcctggtcagagaaggatgcttgagaatctgagatttacacag

SEQ ID NO: 496 - DNA, 192 bp, Homo sapiens
ctgcggtggtaggctgcagacctcacccgcaccgatccagaccactcctcccaaggacacttgtagcccggagctgctcatgtccttgatccagacaaagtgtgccgacgacgccatgaccctggtactaaagaaagagcttgttgcgcatttgaagtgcaccatcacgggcctgaccttctgggaccccag

SEQ ID NO: 497 - DNA, 241 bp, Homo sapiens
cctaccgcaaggtcacagcacagttttgtatagaatgttgcagaaaacaggatggagaagccactactgctgctatgaaggagtgcggggggcggggcggggggtcccacagaacctgctttccaaacgctgctgctgaacactggccttgaaatgaacaccaggacaatctgtgtgtgatgggaatgagccacctcagatgtggagggccctgaagaatccatataggagggcaggctct

SEQ ID NO: 498 - DNA, 194 bp, Homo sapiens
ctgtccctccactacagaaacctcacagaacacagcaaaggataagtgcaagaaggctgcttccagctccaaagcacctaagaatggaggtaaagcgaaggattcagcaaagacaacagaggaaacttccaagccaaaagatgactaaagaaatacaagttaaggtatctggtatctgcatgtaaaatcttcag

SEQ ID NO: 499 - DNA, 398 bp, Homo sapiens
  misc_feature 395: n = A,T,C or G
tttttgtgtgagcaacaaggctgtttatttcacctgggtgcaggcgggctgagtccgaaaagagagtcagcaaagggagatggggtggggccgttttataggattagggaaggtaatggaaaattacagtcaaagggggtttgttctctggtgggcaggtgtggatctcacaaagtacactctcaagggtggggagaattacaaaggaccttcttaagggtgggggagattacaaagtacatttatcagttagggtggggcaggaacaaatcacaatgttggaatgtcatcagttaaggctgtttttacttcttttgtggatcttcagttacttcaggccatctggatgtatacgtgcaagtcacaggggatgcgatggcctggcctgggctcanagg

SEQ ID NO: 500 - DNA, 437 bp, Homo sapiens
  misc_feature 344, 428: n = A,T,C or G
ctgttagagtatttagagtcctgagataacaaggaatccaggcatcctttagacagtcttctgttgtcctttcttcccaatcagagatttgtggatgtgtggaatgacaccaccaccagcaattgtagccttgatgagagaatccaattcttcatctccacgaatagcaagttgcaagtgacgaggggtaatacgctttacctttaagtcttttgatgcatttcctgccagttcaagtacctctgcggtgaggtactccaggatggctgcgctgtacacagcggcagtcgcgcccacacgtccatgactggtcgtcctagattttaggtgtcgatgaatacggnccactgggaactgcaagccggctctctgcgagcgggaaaccgcctttgtcttggcctttccggagtcctttccagccttaccgncagccattt

SEQ ID NO: 501 - DNA, 488 bp, Homo sapiens
  misc_feature 478: n = A,T,C or G
ccaatcagtgggatccgaggtggctcggcccatcatgcccaggatctgagcccacatctggcaccagctctaccaagggcctgttgggcccacacaagcttgcctgtacctagtcaggctggtaccggcacctcctgaaatgggtcaccctccggttcctgctcagcagctctgagcccttttccagcctcttggagggaagtaacaacagcagcatctgccgaggagcacacggttcaggctccatcaatgacggtgatgtcgaggggccccagggctaccctccacctcgagttacctttgatcacaactagggcatctttctggctgagttaaggtgagaacagtcccctgaagcctcccccaaataagtgaaaagtgctctactgtggggtctggaaagaagaaagcaaaaagcagcctattcacgttcacagtcgaaaaatgtaagctaaattgtaaacctgctcaaagaaantctagaaagg

SEQ ID NO: 502 - DNA, 589 bp, Homo sapiens
  misc_feature 422, 537, 547, 558, 568, 575: n = A,T,C or G
aaatcaacattaaccaaagtacctgcaagtaacactgcttactcttgctgtttgcctcatctgactggaaaccttagcccccaaatatgaaatgccttctctagattaaaaggattcagagatgttacactattgcactatatttctgcttcccgatctcgtttctgagtcctagtgaaatcgtaaacaagagatgaaataaacgtcgctccattttaataccgtctttagtatcatacacatgtgttcagtagtgagccacccaaagcctcctgccacaggagcagtagtcgaagcacagaggggaccccgctctgctgcctccccatgcagtccagtgatgaggtggatggagtcctccccacagtcacaccccaagcttcctcttctggtggaaataggcatcaaaccttgcttgggcntagtccagcttccaacccaaagtcgggcactacaggctggagaatgaagtggtaaccgataaataaaaccttccacagcacaggcaggagccacccactcttcttcacttactgncccgtgtcanaagggactgangtcagagctngacttcnagggtgcagatgcc

SEQ ID NO: 503 - DNA, 192 bp, Homo sapiens
  misc_feature 35, 36, 38, 71, 125, 143, 189: n = A,T,C or G
gcttttttttttttttttttttttttttttttaanncncagggtttatttgcaaaactgggctgggttgancaaagggggctttgggatgctgacccctctctgacctggccgttgcgacctcanccctgagttaccctgcancaggcatggacaggcggccgccttgcctgtcgcaacttcctggcancaa

SEQ ID NO: 504 - DNA, 473 bp, Homo sapiens
  misc_feature 427: n = A,T,C or G
cctgacattcctgccttcttatattaataagacaaataaaacaaaatagtgttgaagtgttggggcagcgaaaatttttggggggtggtatggagagataatgggcgatgtttctcagggctgcttcaagcgggattaggggcggcgtgggagcctagagtgggagagattaagctgaagggaggtcttgtggtaaggggtgatatcatggggatgttagaagaaacatttgtcgtatagaatgattggtgatggcctggatacggttttggatgatttgagaagctaaatggaagatacaaggtccgaataaaaggaggagaaaaatgggtattaaatgtctaagaattgggaggacctaggacatctgattagagagtgcctaaggagattcagcatagtcctgccagcaaagattatttacttnaagagttaagagtggcagtttgggggatagcaccaggagatatcag

SEQ ID NO: 505 - DNA, 131 bp, Homo sapiens
ccaaatatcatctttgatgacctctcctaactcatcagcacctgcatcagaatggtcagtaaaccaggtaaagaagctctctggttcctcatgctgcctcttcctgctggctttattctgtgtttgactcg

SEQ ID NO: 506 - DNA, 504 bp, Homo sapiens
  misc_feature 195, 476: n = A,T,C or G
gtgcaaaggatgagttgcacattgttgaagcagaggcaatgaattacgaaggcagtccaattaaagtaacactggcaactttgaaaatgtctgtacagccaacggtttcccttgggggctttgaaataacaccaccagtggtcttaaggttgaagtgtggttcagggccagtgcatattagtggacagcacttantagctgtggaggaagatgcagagtcagaagatgaagaggaggaggatgtgaaactcttaagtatatctggaaagcggtctgcccctggaggtggtagcaaggttccacagaaaaaagtaaaacttgctgctgatgaagatgatgacgatgatgatgaagaggatgatgatgaagatgatgatgatgatgattttgatgatgaggaagctgaagaaaaagcgccagtgaagaaatctatacgagatactccagccaaaaatgcacaaaagtcaaatcagaantggaaaagactcaaaaccaccatcaaca

SEQ ID NO: 507 - DNA, 337 bp, Homo sapiens
ccacacatagcacagccaccagtgtcctcagaactagcagtcagggtcacagaacagtattcaaaatgattgcccacctgttttagaaatctaaaattttacatgtaactaagagcaaagtgctatgtgggttttagaccatgactgtttgtttgctctcctgccctaccaccaagcaaagcagcagggctcctgggggagagggatttcaacccccctgatggcagggggtgctctggggaggagagaggagagaacaggctgttttggaaaattccagcactttgacttcgggccatgcgtctctcctggacgttctgagtacggatcgctcagg

SEQ ID NO: 508 - DNA, 319 bp, Homo sapiens
agtaagtcaacagcttattttaggaaactgtaaaagtaatagggaaagagatttcactatttgcttcatcagtggtaggggggcggtgactgcaactgtgttagcagaaattcacagagaatggggatttaaggttagcagagaaacttggaaagttctgtgttaggatcttgctggcagaattaactttttgcaaaagttttatacacagatatttgtattaaatttggagtcatagtcagaagactcagatcataattggcttatttttctatttccgtaactattgtaatttccacttttgtaataattttgattt

SEQ ID NO: 509 - DNA, 454 bp, Homo sapiens
ctggcttcactgctcaggtgattatcctgaaccatccaggccaaataagcgccggctatgcccctgtattggattgccacacggctcacattgcatgcaagtttgctgagctgaaggaaaagattgatcgccgttctggtaaaaagctggaagatggccctaaattcttgaagtctggtgatgctgccattgttgatatggttcctggcaagcccatgtgtgttgagagcttctcagactatccacctttgggtcgctttgctgttcgtgatatgagacagacagttgcggtgggtgtcatcaaagcagtggacaagaaggctgctggagctggcaaggtcaccaagtctgcccagaaagctcagaaggctaaatgaatattatccctaatacctgccaccccactcttaatcagtggtggaagaacggtctcagaactgtttgtttcaattgg

SEQ ID NO: 510 - DNA, 325 bp, Homo sapiens
  misc_feature 37, 70, 95, 146, 154, 164, 167, 226, 279, 317, 320, 322: n = A,T,C or G
agctttttttttttttttttttttttttttttttttngcattgcaaaaatttattaaaattggagacccntgttttaatcttcttgtgccatganactccatcaggcagtctacaaagaccactgggaggctgaagatcacttgancccaaaantttgaggctntantaagcttcaaaggccactgcaccctaacttgggtgaggcaagaccctttcaagcataanctgcatgcttgcttgttgggggcattaaaaaccctgaaagcgaagcccacatnttaatcagggcaaaatacaaatgtgtgatgcttgttantanantaa

SEQ ID NO: 511 - DNA, 136 bp, Homo sapiens
cctctggttgcaggactcgtgaatggagcagttctgagaaccacccttttgctaagggagcttgggagccacatggctgctcccttcacactgggtaacagtgtagtatcctgtgagagaataaatgtattcattt

SEQ ID NO: 512 - DNA, 474 bp, Homo sapiens
cagccggggaggctcccctcagatggatgacatcaaagtgttccagaatgaagttttaggaacactacagcggggcaaagaggagaacatttcttgtgacaatctcgtcctggaaatcaactctctcaagtaagagcagcccctccctgttctcctcggggtgatcccgggaaggtagaggctttctcgtaagtgttttgtctccaaataggaacctattccttcgacatcccaaatggaaagaccagtagtatttggagcagggagagcattattaagttctagcctcagcatagactttctccttcctaaaccctccccttccatattgttccatccagattcctctccaatgtctatcaaagtcatagttctaagcctgctgaaaggccagtgaaggccctggtgtcaccccagtctccccacaggtatgcctataacgtaagtctaaaggaggtgatgcaggtactgagc

SEQ ID NO: 513 - DNA, 315 bp, Homo sapiens
ccacacaggctatctgaacacggtgactgtctctccagatggatccctctgtgcttctggaggcaaggatggccaggccatgttatgggatctcaacgaaggcaaacacctttacacgctagatggtggggacatcatcaacgccctgtgcttcagccctaaccgctactggctgtgtgctgccacaggccccagcatcaagatctgggatttagagggaaagatcattgtagatgaactgaagcaagaagttatcagtaccagcagcaaggcagaaccaccccagtgcacctccctggcctggtctgctgatgg

SEQ ID NO: 514 - DNA, 385 bp, Homo sapiens
aaaaatatttacgtcttacaggagctggataatccaggtgcaaaacgaattctagagcttgaccagtttaaggggcagcagggacaaaaacgtttccaagacatgatgggccacggatctgactactcactcagtgaagtgctgtgggtctgtgccaacctctttagtgatgtccaattcaagatgagtcataagaggatcatgctgttcaccaatgaagacaacccccatggcaatgacagtgccaaagccagccgggccaggaccaaagccggtgatctccgagatacaggcatcttccttgacttgatgcacctgaagaaacctgggggctttgacatatccttgttctacagagatatcatcagcatagcagaggatgagg

SEQ ID NO: 515 - DNA, 216 bp, Homo sapiens
aaatttcatttactttgttttactgtaatttacacaagagactgacaagtaaactaggtattttacattcaccacacattccctcaaatctccacagttgttagaaaaacattaaaatccatgcgccgggctctcatttccatgtgcgcctaagctcccaatgatactacagatgccagcgagagttaagttcattaaaaggagagggctagactc

SEQ ID NO: 516 - DNA, 324 bp, Homo sapiens
cctctgttgccagaccagagctggaggtaaatgctgccatagtctctggacaaagcagtgagcccaaagagatagttgaaaagtccaaaatcccaggccgaagaaactcccgaactgaagagccaactgtggcctctgaaagtgtggaaaatggacatcgtaaacgatcttctcgacctgcttcagcctccagctctactaaagacataaccagtgcggtgcaatccaagcgaagaaaatccaagtaaacaagcaggactgcgacttgatacttggaaatgtgtgtgacttttacaaagagcaattttgagctgtgactttttt

SEQ ID NO: 517 - DNA, 279 bp, Homo sapiens
ctgaccccgcctgagggctcctcaaagtctgagcaagaccaggcagaaaatgagggcgaggactcggctgtgttgatggagagactgtgcaagtacatctacgccaaggaccgcacagaccggatccgcacatgtgccatcctctgccacatctaccaccatgctctgcactcgcgctggtaccaggcccgcgacctcatgctcatgagccacttgcaggacaacattcagcatgcaggcccgccagtgcagatcttttacaaccgcaccatggtgcag

SEQ ID NO: 518 - DNA, 390 bp, Homo sapiens
aaaaagtagttagcatttaatgaaactccctccatgtggcttcaagccaccaggacacaggcccccccaacactcttaatcttctcctcagctcttctgctgaagaatttggccttcacgatgacaggctgctttgggagctttccctttcccagaactttgtagtagcccgatcgcaccacatcaatgatgggagcagcccccgtcttgtttttagcagcattcacccgtgtctgttcactgaccaaagtccacaatttgtcaaggttgacagttgggcagaagctctggttcctctttaagtggtaatgcttcataccaactttcccaaagtagcctgggtggtatttgtcgaagttgatccggtggtgatgcagaccaccagcatta

SEQ ID NO: 519 - DNA, 476 bp, Homo sapiens
ctggtgaatgacggtgccatgactgaggtggtcgaaagggagtatttaaggggaaatcaggcattccgttttgaccaaattaagctggagatgcctgtggaacattccagccaggctgcatcacgtcacactgaccttcagcattgcccacagtccatcttcccccaggacctgaggattttgcgtccggctccctcctcgcccaggacccccaagctcccagcacgcttctgatttttttttgtaggtttttttttttgttttttgttttgttttgttttgtttttgagagggagtctcactttgtgccctagactggagtgcaatggcgccatctcggcttactgcaacctccacctcccaggtgcaagcgattcccctgcctcagcttcccgagtagctgggattacagatgtgagccaccgtacccagctaatttttgtatttttagtagagacggggtttcaccatattgg

SEQ ID NO: 520 - DNA, 454 bp, Homo sapiens; identical to SEQ ID NO: 509

SEQ ID NO: 521 - DNA, 322 bp, Homo sapiens
ggcctcttacctggacagagtgaggagcctggagaccgagaaccggaggctggagagcaaaatccgggagcacttggagaagaagggaccccaggtcagagactggagccattacttcaagatcatcgaggacctgagggctcagatcttcgcaaatactgtggacaatgcccgcatcgttctgcagattgacaatgcccgtcttgctgctgatgactttagagtcaagtatgagacagagccggccatgcgccagtctgtggagaacgacatccatgggctccgcaaggtcattgatgacaccaatatcacacgactgcag

SEQ ID NO: 522 - DNA, 379 bp, Homo sapiens
aaagcaacagaacctcgctgtcagtgagagtcctgtcacaccctctgcactcgctgagcttcttgacctgctggacagcagaacaatttcttcatcagcagctaaacaggtgtttgaggaactgtggaagagggaaggcaagactccagggcagattgtttcagaaaagcagcttgaactgatgcaggaccagggggcactggagcagctctaccactctgtgatggaggcccatcctcaagtggtaatggatgtgaagaacagaaaccccagagctataaataaactgattgggttggtccggaaagcgactcaaagccgagcagatccagtcatgataaaggagatcctggagaagaagctgtcattgtgagatgtt

SEQ ID NO: 523 - DNA, 415 bp, Homo sapiens
  misc_feature 320, 365: n = A,T,C or G
ctggcttcactgctcaggtgattatcctgaaccatccaggccaaataagcgccggctatgcccctgtattggattgccacacggctcacattgcatgcaagtttgctgagctgaaggaaaagattgatcgccgttctggtaaaaagctggaagatggccctaaattcttgaagtctggtgatgctgccattgttgatatggttcctggcaagcccatgtgtgttgagagcttctcagactatccacctttgggtcgctttgctgttcgtgatatgagacagacagttgcggtgggtgtcatcaaagcagtggacaagaangctgctggagctggcaaggtcaccaagtctgcccagaaagctcanaaggctaaatgaatattatccctaatacctgccaccccactcttaatcag

SEQ ID NO: 524 - DNA, 245 bp, Homo sapiens
tgcaaaaccccactctgcatcaactgaacgcaaatcagccactttaattaagctaagcccttactagaccaatgggacttaaacccacaaacacttagttaacagctaagcaccctaatcaactggcttcaatctacttctcccgccgccgggaaaaaaggcgggagaagccccggcaggtttgaagctgcttcttcgaatttgcaattcaatatgaaaatcacctcggagctggtaaaaagagg

SEQ ID NO: 525 - DNA, 459 bp, Homo sapiens
  misc_feature 439: n = A,T,C or G
aaaattatttcttgaatctctccatacacaggcaaaaataagtgtgttacttaacatactggaaattgcctaacttaatcattgcctaaagaagagaaaattatccccaaaacgcgcttaaccaggaggccaatgcatttgccgacctccaagaacatggagatgaacgtgatagacagactgtccaccatctgaaccttcattcaccaccattcgataacccttattcaggcccagatcagcagcacatttcttgccaacaatcattaagtgtccaagaagactttcatcatcatcttctaccacagaaatctgggatatatgtttcttgggtatcaccagaaaatgtgttggtgcttgaggggaaatgtcatggaaagcaaggcaccggtcatcctcaaaaatgattttggctggtatttccttgcggatgatcttnccaaagatcgtgtcgccacc

SEQ ID NO: 526 - DNA, 368 bp, Homo sapiens
  misc_feature 97, 109, 131, 260, 266, 343: n = A,T,C or G
ccaaggccccttttgcagcccacggctatggtgccttcctgactctcagtatcctcgaccgatactacacaccgactatctcacgtgagagggcagnggaactccttangaaatgtctggaggagctccanaaacgcttcatcctgaatctgccaaccttcagtgttcgaatcattgacaaaaatggcatccatgacctggataacatttccttccccaaacagggctcctaacatcatgtcctccctcccacttgccanggaacnttttttgatgggctcctttatttttttctactcttttcaggcgcactcttgataaatggttaattcagaataaaggngactatggatataattgagccctct

SEQ ID NO: 527 - DNA, 418 bp, Homo sapiens
  misc_feature 45, 68, 76, 88, 95, 187, 235, 240, 242, 246, 269, 274, 340,363, 377, 379, 382, 394, 405, 409: n = A,T,C or G
gtacaagcttttttttttttttttttttttttttttttcaggctngttttattttaatggctgatctntgtaatcncagaggccagtntgtacanacaaagtgggaggttttatttcttggtctcttcctccttggataaagtcttgatgatctcctccttcttggcctggaggcgctcttcacggngcttgcgtgcttccttggtcttaaacctgcgggcctcaacctggtcanccagnancttnttgcgggccttgtctgccttcancttgnggatgtgttccatgaaaatccgcttgtttttgaacacattccccttcaccttcaggtacaggctgngatacatgtggcgatcgatcttnttaaattcacggtntnttntgagcagccggngcaaaatcctnattntcctcatcc

SEQ ID NO: 528 - DNA, 477 bp, Homo sapiens
  misc_feature 385: n = A,T,C or G
ccatttttcctgaatgacatcaattatgtcatctgtaaaatctccctgaatgataatttcatcctcccctgttactgaggcaccacaggagaatttttgagcaaaaaatctttgtgcttctttaagatcaatttcaaaagttgcaaggccacatactcttgtcacatatttcttctttgctctgggaattttggctatagtaaccttttgtggtacggtcttctttttttgttttatttgaccccttccacctctcttctgttttttcttctcctcttcttcccctgctgttccttgaccctcactaattccagcttcttgtttgggtgaattttctacagtaagttttgcaaattcatttggaaaattcttctctaaccattgnctacatttagcaacatcaggcatatattcacagtactctgttggtaatgaacagactccacaataaaggactcgaagtgggtaatcggcatc

SEQ ID NO: 529 - DNA, 217 bp, Homo sapiens
agaaattgagatgccccccaggccagcaaatgttcctttttgttcaaagtctatttttattccttgatatttttctttctttttttttttttttttggatggggacttgtgaatttttctaaaggtgctatttaacatgggaggagagcgtgtgcggctccagcccagcccgctgctcactttccaccctctctccacctgcctctggcttctcagg

SEQ ID NO: 530 - DNA, 479 bp, Homo sapiens
aaaactgataataatgctgaattatcttaagtgagatgttaagcccactttgttcttttaatgtaatggagcttatgggtagaagaccatgtctactaattacaaaaaaaaaaaaaaaaccatgcattactgcttttcctaccacttccagtaagaaaatgggtgttttgaagaaatcatttgccttgtcctcacggaatctgattaagccctggcctcttgattgtatagagtcattgtgtatattccagttacctagatattcccttgagattttgatacaatttgagggaggcagaagtctgcagttgaagaaaaaaaataagtctgtttgtcatatttaagtagcctgtggctatttttatactgattttgatatcatgttcttttcatagtcgtattttgccaccgtaaacataaaaaaaaaaaaaagatttccaaaatgccgttttcagaacctgggttttaatagcagtatt

SEQ ID NO: 531 - DNA, 344 bp, Homo sapiens
ctgtccaatgacaacaggaccctcactctactcagtgtcacaaggaatgatgtaggaccctatgagtgtggaatccagaacgaattaagtgttgaccacagcgacccagtcatcctgaatgtcctctatggcccagacgaccccaccatttccccctcatacacctattaccgtccaggggtgaacctcagcctctcctgccatgcagcctctaacccacctgcacagtattcttggctgattgatgggaacatccagcaacacacacaagagctctttatctccaacatcactgagaagaacagcggactctatacctgccaggccaataactcagccagtgg

SEQ ID NO: 532 - DNA, 229 bp, Homo sapiens
ctgatattagtagctttgcaaccctgatagagtaaataaattttatgggtgggtgccaaatactgctgtgaatctatttgtatagtatccatgaatgaatttatggaaatagatatttgtgcagctcaatttatgcagagattaaatgacatcataatactggatgaaaacttgcatagaattctgattaaatagtgggtctgtttcacatgtgcagtttgaagtattt

SEQ ID NO: 533 - DNA, 516 bp, Homo sapiens
ctaccctgccactggcccctatggcgcccctgctgggccactgattgtgccttataacctgcctttgcctgggggagtggtgcctcgcatgctgataacaattctgggcacggtgaagcccaatgcaaacagaattgctttagatttccaaagagggaatgatgttgccttccactttaacccacgcttcaatgagaacaacaggagagtcattgtttgcaatacaaagctggataataactggggaagggaagaaagacagtcggttttcccatttgaaagtgggaaaccattcaaaatacatgtactggttgaacctgaccacttcaaggttgcagtgaatgatgctcacttgttgcagtacaatcatcgggttaaaaaactcaatgaaatcagcaaactgggaatttctggtgacatagacctcaccagtgcttcatataccatgatataatctgaaaggggcagattaaaaaaaaaaaagaatctaaaccttacatgtgtaaaggtttcatg

SEQ ID NO: 534 - DNA, 123 bp, Homo sapiens
ctggtggcttccctgcatgtcagggctcttcgacagatcatgggccacttcgaggggctcgggaaggggtacgctgtgtccgtcgagcaccgggatgcccaccaccggcgcccggtgcatcag

SEQ ID NO: 535 - DNA, 503 bp, Homo sapiens
  misc_feature 390: n = A,T,C or G
ccagttttatccgagactctaaataagcaccgagctgataatcggattgtagagcgttgttgcaggtgcctgcgctttgctgttcgctgtgtaggcaaaggatctgcagcactgctgcagccactagtcacacagatggtgaatgtgtaccacgtacatcagcattcctgcttcctgtaccttggcagtatccttgtggatgaatatggcatggaagaaggctgtcggcagggactgctagacatgctccaggcactgtgcatccccacctttcagctcctagaacagcagaatggtctccagaatcaccctgacactgtagatgacctgttccggctagccaccaggtttattcagcgtagccctgtcaccttgctgcggagccaagtngtcatccctatcttacagtgggccattgcctctactaccctggaccaccgggatgccaattgtagtgtcatgaggtttctacgagacctcattcatacaggggtagccaatga

SEQ ID NO: 536 - DNA, 364 bp, Homo sapiens
  misc_feature 337: n = A,T,C or G
ggctactgggggaacaagatcggcaagccccacactgtcccttgcaaggtgacaggccgctgcggctctgtgctggtacgcctcatccctgcacccaggggcactggcatcgtctccgcacctgtgcctaagaagctgctcatgatggctggtatcgatgactgctacacctcagcccggggctgcactgccaccctgggcaacttcgccaaggccacctttgatgccatttctaagacctacagctacctgacccccgacctctggaaggagactgtattcaccaagtctccctatcaggagttcactgaccacctcgtcaagacccacaccagantctccgtgcagcggactcaggctccag

SEQ ID NO: 537 - DNA, 273 bp, Homo sapiens
ctgggcctgaagctgtagggtaaatcagaggcaggcttctgagtgatgagagtcctgagacaataggccacataaacttggctggatggaacctcacaataaggtggtcacctcttgtttgtttagggggatgccaaggataaggccagctcagttatatgaagagaagcagaacaaacaagtctttcagagaaatggatgcaatcagagtgggatcccggtcacatcaaggtcacactccaccttcatgtgcctgaatggttgccaggtcag

SEQ ID NO: 538 - DNA, 339 bp, Homo sapiens
  misc_feature 266: n = A,T,C or G
cctcctgcactccgcccggacccccggccccgccgtggctatccagtcagttcgctgctattcccatgggtcacaggagacagatgaggagtttgatgctcgctgggtaacatacttcaacaagccagatatagatgcctgggaattgcgtaaagggataaacacacttgttacctatgatatggttccagagcccaaaatcattgatgctgctttgcgggcatgcagacggttaaatgattttgctagtacagttcgtatcctanaggttgttaaggacaaagcaggacctcataaggaaatctacccctatgtcatccaggaacttagaccaacttt

SEQ ID NO: 539 - DNA, 179 bp, Homo sapiens
caaagtggtacagaccaagtatgtggaagccaaggactgtctgaacgtgctgaacaagagcaacgaggggaaagaattactcgtcccactgacgagttctatgtatgtccctgggaagctgcatgatgtggaacacgtgctcatcgatgtgggaactgggtactatgtagagaagacag

SEQ ID NO: 540 - DNA, 342 bp, Homo sapiens
  misc_feature 229, 284: n = A,T,C or G
ccacttggcccaggtagaagtagatgaagtgtttggtttcatgtgtcacataactaccgaagttcctccccacgatgcaatgccaggtgggattgtacttcttgtcaaattccttcttgatatgagccgcaatgtccttctctatgttgtatttctccagcgcctgagtagcgcactccaccgagtcctgttgcatctcttccgacatgtccgcatttttgatcacggnctttcggtcgcacttggttaccgtggagaaggggctggccgactgcaacggtctnctgggggaggtgctagcacagctcaagcccggctagagctaccgtcgctaccgaaaca

SEQ ID NO: 541 - DNA, 422 bp, Homo sapiens
  misc_feature 332, 334: n = A,T,C or G
caacagaataaatacttttatagtagttttataatcctgaaattcgaaagctttcccaattgcacttgcatctaaacaaaactgttgcagtttttactctatttattttgttccccatgtttatgaaagtcctgcacagtttcaaaggcatggtaaataatatatcaatgtttatgtagtctgttacagaaacagctatagataacattatccagtgaagagcaaaattcaagctttagaaaatattcatgcatgcaattttgacatatctaaaaataggtttttgtatatttatggtgggaggtggttgggaacttttaacaaaatggggngntaatttttgtacagtctgtgggcatttacacatttttaatgtattaaaatttggtaattatgtgtacattaaattaataaaagttact

SEQ ID NO: 542 - DNA, 262 bp, Homo sapiens
ctgacaacgaaggccgcgcctgcctttcccatctgtctatctatctggctggcagggaaggaaagaacttgcatgttggtgaaggaagaagtggggtggaagaagtggggtgggacgacagtgaaatctagagtaaaaccaagctggcccaaggtgtcctgcaggctgtaatgcagtttaatcagagtgccatttttttttttgttcaaatgattttaattattggaatgcacaatttttttaatatgcaaataaaaagttt

SEQ ID NO: 543 - DNA, 238 bp, Homo sapiens
ctggagacactttagaactctttccccatcctccaccatagtgcaaacttcacgcttctctgagcacctccaaggtatgcccttgaagtgaaacagaaaagggaagaaagggggctttttcttttccatttctgaccaaacagaggtctgaaatagcagtgtattatgaaattctcattccctgcaacagtcagccaccacttggaaaatggctatttttgccataaactagattttt

SEQ ID NO: 544 - DNA, 346 bp, Homo sapiens
ccaccctgaaaatcaggaactccaacttctacacggtggcagtgaccagcctgtccagccagattcagtacatgaacacagtggtgaattttaccgggaaggccgagatgggaggaccgttttcctatgtgtacttcttctgcacggtacctgagatcctggtgcacaacatagtgatcttcatgcgaacttcagtgaagatttcatacattggcctcatgacccagagctccttggagacacatcactatgtggattgtggaggaaattccacagctatttaacaactgctattggttcttccacacagcgcctgtagaagagagcacagcatatgttcccaagg

SEQ ID NO: 545 - DNA, 418 bp, Homo sapiens
ctgctactgagtaaggggcattcctgttacagaccaaggagaactggagaaagaaagagaaaatcagttcgtggttgcattgtggatgcaaatctgagcgttctcaacttggttattgtaaaaaaaggagagaaggatattcctggactgactgatactacagtgcctcgccgcctgggccccaaaagagctagcagaatccgcaaacttttcaatctctctaaagaagatgatgtccgccagtatgttgtaagaaagcccttaaataaagaaggtaagaaacctaggaccaaagcacccaagattcagcgtcttgttactccacgtgtcctgcagcacaaacggcggcgtattgctctgaagaagcagcgtaccaagaaaaataaagaagaggctgcagaatatgctaaacttttgg

SEQ ID NO: 546 - DNA, 492 bp, Homo sapiens
cgaattcttcaggatgatgttgcatgtgacatcattaaaataggttctttagtaaggaataaagagagatttgtaaaacgaagacaacggcttattggtcccaaaggatctacattgaaggcattggaactcttaactaattgttacattatggttcagggaaacacagtttcagccattggaccttttagtggcttaaaagaggttagaaaagtagtccttgatactatgaagaatattcatccaatttataacattaaaagcttaatgattaagagagagttggcaaaagattctgaattacgatcacaaagttgggagagatttttgccacagttcaaacacaaaaatgtgaataaacgcaaggaaccaaagaaaaaaactgttaagaaagaatatacgccattcccaccaccacaaccagaaagtcagatcgataaagaattggctagtggtgaatactttttgaaggcaaatcagaagaagcggcag

SEQ ID NO: 547 - DNA, 533 bp, Homo sapiens
  misc_feature 515: n = A,T,C or G
aaaagaaaaagatatacttgttttgccccttgacctgaccgacactggttcccatgaagcggctaccaaagctgttctccaggagtttggtagaatcgacattctggtcaacaatggtggaatgtcccagcgttctctgtgcatggataccagcttggatgtctacagaaagctaatagagcttaactacttagggacggtgtccttgacaaaatgtgttctgcctcacatgatcgagaggaagcaaggaaagattgttactgtgaatagcatcctgggtatcatatctgtacctctttccattggatactgtgctagcaagcatgctctccggggtttttttaatggccttcgaacagaacttgccacatacccaggtataatagtttctaacatttgcccaggacctgtgcaatcaaatattgtggagaattccctagctggagaagtcacaaagactataggcaataatggagaccagtcccacaagatgacaaccagtcgttgtgtgcggntgatgttaatcagcatgg

SEQ ID NO: 548 - DNA, 295 bp, Homo sapiens
ccatgtatgtgcatgcatatacactctacagtgctgttagaccttttggctgcagtttcatgttagggtcttacagtgtgaatgacggtgcgcaactctacatgattgacccatcaggtgtttcatacggttattggggctgtgccatcggcaaagccaggcaagctgcaaagacggaaatagagaagcttcagatgaaagaaatgacctgccgtgatatcgttaaagaagttgcaaaaataatttacatagtacatgacgaagttaaggataaagcttttgaactagaactcag

SEQ ID NO: 549 - DNA, 195 bp, Homo sapiens
tgctgttcgtgatatgagacagacagttgcggcgggtgtcatcaaagcagtggacaagaaggctgctggagctggcaaggtcaccaagtctgcccagaaagctcagaaggctaaatgaatattatccctaatacctgccaccccactcttaatcagtggtggaagaacggtctcagaactgtttgtttcaattgg

SEQ ID NO: 550 - DNA, 497 bp, Homo sapiens
ccacggggactgttattcgcaagctggttttctagacctgttagctggaagcatggtgagcaccatttctggacgctcaggccgtgtcgggcttcagtcatctccaccacacaggtacagcagcgctttctggtagtcgcccttagtgtcttgctggatataatagtacagggacttgccgtactttctcttgaattcagacctaattttcaacatgtccacttcactgcgggagaccatgattctgatcaggaccttatctcgcgtccccttgcccttcatggagtcatacagccgatcagcaaaatacaggggcttgttctgaatgcactgaaccaggttcaggaaagcattttccaggtctcctttaacctctttcctgatgctttccaacatgtcataagggctgtaactcttgtacctatcaaatactttctggaggtggggcacgctccgctcggtcatgatgctgatccacttgggaacatcagttcctt

SEQ ID NO: 551 - DNA, 496 bp, Homo sapiens
  misc_feature 223, 414: n = A,T,C or G
aaatgttttaggcaacctaaggacaaatgtaaaagtaaagatgcaggaaaaatgaattgcttggtattcattacttcatgtatatcaagcacagcagtaaaacaaaaacccatgtatttaacttttttttaggatttttgcttttgtgattttttttttttttttttgatacttgcctaacatgcatgtgctgtaaaaatagttaacagggaaataacttganatgatggctagctttgtttaatgtcttatgaaattttcatgaacaatccaagcataattgttaagaacacgtgtattaaattcatgtaagtggaataaaagttttatgaatggacttttcaactactttctctacagcttttcatgtaaattagtacacgtgttcttaacaattatgcttggattgttcanaacacgtgtattaaattcatgtaagtggaataaaagttttatgaatggacttttcaactactttctctacagcttttcatgt

SEQ ID NO: 552 - DNA, 422 bp, Homo sapiens
  misc_feature 247, 288, 355, 377, 410, 414, 420: n = A,T,C or G
aaatgttttaggcaacctaaggacaaatgtaaaagtaaagatgcaggaaaaatgaattgcttggtattcattacttcatgtatatcaagcacagcagtaaaacaaaaacccatgtatttaacttttttttaggatttttgcttttgtgattttttttttttttttttgatacttgcctaacatgcatgtgctgtaaaaatagttaacagggaaataacttgagatgatggctagctttgtttaatgncttatgaaattttcatgaacaatccaagcataattgttaanaacacgtgtattaaattcatgtaagtggaataaaagttttatgaatggacttttcaactactttctntacagcttttcatgtaaattantacacgtgttcttaacaattatgcttggattgntcanaacacntg

SEQ ID NO: 553 - DNA, 507 bp, Homo sapiens
  misc_feature 422, 436: n = A,T,C or G
cctaagaactcactggcatttgtttcaaggtaactgaacaagaagctgtttggaattggcagaagtcagataaaaaaccaatcttacatgccccttcttcctctcttgagctgttgtttatattcaaattaaatacacattgtttctctctgtagatacctatgtacttaatagattctagttagtaaactgcacatgcccaataactttgaggaaatttagtgaaaatgaagaaaaagagaaaatatttctctttagacctgaggttatgtttaggctggcccatagaaacaggtccagataaatttctaaaaaagcaaagtagatatttatgaatagtattcaatgcctaggattaacatctaaaatgactcagtagtactgctagccagccaataaaatataaactccatttgtcttanttatatagaactgngtttccagcttagaaaaagtcaaaccaatgacttttagaacaatctactctcattttttattcagcctcta

SEQ ID NO: 554 - DNA, 339 bp, Homo sapiens
cgcaggggcttctgctgagggggcaggcggagcttgaggaaaccgcagataagtttttttctctttgaaagatagagattaatacaactacttaaaaaatatagtcaataggttactaagatattgcttagcgttaagtttttaacgtaattttaatagcttaagattttaagagaaaatatgaagacttagaagagtagcatgaggaaggaaaagataaaaggtttctaaaacatgacggaggttgagatgaagcttcttcatggagtaaaaaatgtatttaaaagaaaattgagagaaaggactacagagccccgaattaataccaatagaagggca

SEQ ID NO: 555 - DNA, 515 bp, Homo sapiens
aaaaccaacaatgatgcctagtgagtatgtgtccacaggccataacagggtagaagagagacatcgtgcaacccaatgagtagtgaagggactgtgttgcttgtgaagcggtgtagtagcatttttgcagattcttggctgggtttagtgtactgatctagaaaagctgtttttctgctcctttgtggaaggcagttatgatcaggctgcatggacaaagcaggtagaggggcaccatcaggggctcttgcactattttcacctctaaatattacgtactcagtagtgccctgcttctagggctctgaatacgggcttaaagtcatcttgtcctgctggaatttgctgtgcagagccataagcctcccattttgttagcgtcagctaggccaataggaacagaccgggaccttgtctcacactgatgatacctcacatgttgaccggctatgtgaactgcctatttcctatgctggagttttgatttttaactaaacgcaaatctgtagattctc

SEQ ID NO: 556 - DNA, 207 bp, Homo sapiens
ctgtgccactcggccatctctgtatgtgactgtgatgttggacatctggcagttcatgttgtcctctgcttcaatgagcttcccccgatatacctcaccggtgttcgtctcacatgtcacaatgtggccctcggcctcatgcagtactttaatcggcacaccaatagacatcttggcaggaagagagttcggctctggcctactttt

SEQ ID NO: 557 - DNA, 491 bp, Homo sapiens
ggccgcccgggcaggtctggcagcgtctgatgtcgggcacagaggtgacaccgcagcgcttgtactgcccgtccccaatggagcgtgacacctctagcacgcccaaaacacgcccatccctgacgtttcctccagccttctgtatcctcatccgctcttcatactgagttggattatgctctttgctgaggcttaaggctgcatgtttttgactctcctcattataacgacacaagattgcccgactatctccgaggttggcaatataaagaatgttgtctacagccagaacacacgtggcagtggacccatctttccaggcaggcttctggctggaagcttgtttaaggaactcttcatcagtatgcttgaaagtgtccaaaaggcatctcttcacggttttctctacactgattacatctcctttaggaaattttctgattaagttttgatgcaaattctgtgcagcaaattttgaggctcgaattcct

SEQ ID NO: 558 - DNA, 511 bp, Homo sapiens
  misc_feature 408, 499: n = A,T,C or G
ctgcctataaaactagacttctgacgctgggctccagcttcattctcacaggtcatcatcctcatccgggagagcagttgtctgagcaacctctaagtcgtgctcatactgtgctgccaaagctgggtccatgacaacttctggtggggcgagagcaggcatggcaacaaattccaagttagggtctccaatgagcttcctagcaagccagaggaagggcttttcaaagttgtagttacttttggcagaaatgtcgtagtactgaagattcttctttcggtggaagacaatggatttcgccttcactttcctgtccttaatatccactttgttgccacacaacacaatggggatgttttcacacactcgtaccagatctctatgccagttaggcacattcttgtaagnaactctcgatgttacatcaaacattatgatggcacactgggcttggatataatagccatctctcagtccaccgaatttctcctggccggcngtgtcccataca

SEQ ID NO: 559 - DNA, 301 bp, Homo sapiens
  misc_feature 198, 253, 263, 279: n = A,T,C or G
ccatgttcttcagaaagaacatgcctggctttttcacgatttgatcagtcttcttagaccctgaaccccaccatgaaatggcttccccagacacaacccgagagagttatgctttgtttctcagctaaaatattttgcagatcttaatttcctgggtcattgcatcatttttttttttttttaaagactgagtttaanaaataaattatcggccgggcgaggtggctcatgcctataatccaagcactttganaggccaaggngggtgggtcacaaggncaggagtttgagaccagcctgg

SEQ ID NO: 560 - DNA, 218 bp, Homo sapiens
ctgctgcagttcactggacaaggattcgccatcgacactgtgcttggccgcactggagaggatgaaactcagcactgccactgtggccttcacatcgcctgactcaaacttggcgtcagccgtgagcttcaggatcttctcataatcaatcccctgtcccagcagctcctttagtacctggctgcagagcagccgcaacttcacagaggacatcttgg

SEQ ID NO: 561 - DNA, 436 bp, Homo sapiens
aaaggcttaatggcaataatcaggggaggaagaagagtatgtttattttacataactgacggaaaaataaattcaacaaatagtaaatagaatttaatatggtctcatgcgccctgaaggaggtggtgcccgatttggaggggtaattgctatgtccaagtaatctcctatctggaacttctgcgactgcagggtcatggaatcatcagtcccctttctgccagacatggtgctgccaatctccttaactcgatagccaggtcttttaacatctgtaaaaacgattgcaaaattgaagtgagtgcccttctttctagcttctgggtagacttcttttactaagcttgtcagttctttcaaggttgcatccatccaagtgtagatctgcaactcgctggacggtacatttccccgggagaactcgtccattcggtgg

SEQ ID NO: 562 - DNA, 385 bp, Homo sapiens
  misc_feature 104, 254, 255, 317: n = A,T,C or G
ttggtcttgaactcctgacctcgtgatccatccaccttggcctcccaaagtgctgggattacaggtatgagccaccgcgcctggccttttttttttttttttanacaggttttggctctgtcacccaggctggagtgcagtggttcttaaacgggggtaattatgtcctccattcccgccaggagacacctggcaatgtctgggagacatttttggttattaccctgagagaggagagctccatgggcactganngggtagaggccggggtgctactaaacatcctacaatgaccaggacagcctcccacgacaaanaatcatccagccccaaatgtcagtagagccaggattccaaaaccctggtgttaggtataagaattgac

SEQ ID NO: 563 - DNA, 409 bp, Homo sapiens
  misc_feature 260, 355: n = A,T,C or G
gcacctttccccaacaggaacagagtcatccagccaatggggatgagtccccggggtcatcttacgtccctgcaggatgccatgtgcgagactatggagcagcagctctcctcggaccctgactcggaccctgactgaggatggcagctcttctgctcccccatcaggactggtgctgcttccagagacttccttggggttgcaacctggggaagccacatcccactggatccacacccgcccccacttctccatcttanaaaccccttctcttgactcccgttctgttcatgatttgcctctggtccagtttctcatctctggactgcaacggtcttcttgtgctagaactcangctcagcctcgaattccacagacgaagtactttcttttgtctgcgccaagaaga

SEQ ID NO: 564 - DNA, 390 bp, Homo sapiens
  misc_feature 245, 318, 334, 390: n = A,T,C or G
cctgggtgattgaggatgcaatgagctgtgattgtgccaccacactccagcctgggcaatacagcaagactgtctcaaaaaaaaaaaaaaaaacccaaaaaaactcaagaatgtaatgaatgatacccaatgtgccttttctagaaaaagttgccaaatatatctcttggatctgctgagcatgtcctctgatacataaggcaagcatgtttctacacccagtgttgatgccagttagttttcanaatccaaactgatggcagctactggtccttgggactgacatcctctgggaatataaccttctcttggactganatgctgctgccagctntaaaacagcactctgttctcaaaacctcatggcaggctcctggctccaatactcan

SEQ ID NO: 565 - DNA, 219 bp, Homo sapiens
ccaagaggaatcagaaacctgaagttagaaaggctcaacgagaacaagctatcagggctgctaaggaagcaaaaaaggctaagcaagcatctaaaaagactgcaatggctgctgctaaggcacctacaaaggcagcacctaagcaaaagattgtgaagcctgtgaaagtttcagctccccgagttggtggaaaacgctaaactggcagattagattttt

SEQ ID NO: 566 - DNA, 312 bp, Homo sapiens
  misc_feature 249, 307: n = A,T,C or G
ctgcctgcctgccagaggccaagcattcctaagcgtgggctgggggaggccctgcccctctgtagcagcagagcagacagggcagtgggagaaccatgtgggtaggagggcatcaggtctcaagagcctctcccctgctcaggactgggtctagacaaggccacgtgtgatagggtggtaagccctgggccatatggaggagcctggggcccatcttggttctgctgctgagttgctgggtggctttangcaagtcccttcttgtcccttggtcactctgtttcctggctagcactggcagcaaggnctcca

SEQ ID NO: 567 - DNA, 583 bp, Homo sapiens
  misc_feature 457, 560: n = A,T,C or G
ctgcatttgggggagaggggtagggattatcttcaaagcaccccagctctcttgatgagaaggtcagaggtacactggtttgtattattgcgacatccataaggtgatctaggttgcttttccttcagcaagggctttatttatcagaaggacattacgcttgacctccaaatttggctgacaatttactgatgagattcataacctttgggttgctctggtattttgacatatttgctgggttctgagccacatcctggaaagccaccataacttctggatcctgcatggctgcaagaacctctggatcactaagaatttcattgagtccaggcattccagccattccaggcatgccccctcccattccaggtattcctccgggaaaattaccaggcattcccccaggaaagccacctggaaaagagccatactgagctcctgactgtcgtctggncttcttcctccctctgggctctctcatgctcttctcgagccttcttaactcgttctattctttctttgatctctcgctcttcacgtttttcgctcatactttnttccgatgttctgcaattttctg

SEQ ID NO: 568 - DNA, 265 bp, Homo sapiens
cctaagaatgcagacggggagaaaaaaaaccaaaaccaaaaaaaaagacacctctccaattgctgggagggcctgggaataggtgaagatcaaaccacagtgggagaagagggtaaagatgtgagcttcaagcgggtaatgggcaagccacacctcccagttcctaggagggaatcgccacggccgacttcagcattctcgtctttactaagacttacccatagagaactacagcaggaaaccgatttcttcattcattctcttt

SEQ ID NO: 569 - DNA, 251 bp, Homo sapiens
cgcgggacaccgggtgtagagggcggtcgcggcgggcagtggcggcagaatgttggctaccagggtatttagcctagttggcaagcgagcaatttccacctctgtgtgtgtacgagctcatgaaagtgttgtgaagagcgaagacttttcgcccccagcttatatggatcggcgtgaccaccccttgccggaggtggcccatgtcaagcacctgtctgccagccagaaggcactgaaggagaaggagaagg

SEQ ID NO: 570 - DNA, 305 bp, Homo sapiens
ctggagaaggacttcagcagcgtgaagaagtactgccaagtcatccgtgtcattgcccacacccagatgcgcctgcttcctctgcgccagaagaaggcccacctgatggagatccaggtgaacggaagcactgtggccgagaagctggactgggcccgcgagaggcttgagcagcaggtacctgtgaaccaagtgtttgggcaggatgagatgatcgacgtcatcggggtgaccaagggcaaaggctacaaaggggtcaccagtcgttggcacaccaagaagctgccccgcaagacccaccgagg

SEQ ID NO: 571 - DNA, 367 bp, Homo sapiens
  misc_feature 216, 219, 240, 273, 326, 347, 351: n = A,T,C or G
ctgaagatccgtaagagcaatcagatacctactgaggtcaggagcaaagctgaggaggtggtgtcatttgtgaagaagaatgttctagtaactgggggatttttcggaggctttctgcttggcatggcatcctaaggaagatgacctcatgttcattgttcctggttttttccagccagcagcctctacactccatcataggacatcgagtccctnctnctcttctcccatgccttcttncctgccatggcaaatctgagtggcttctctaancatctgctggtacaagtcaatgtggcaccatgagcttcatggtggcagaaganacaatagtccttactcttctnccantacaccccctacttgg

SEQ ID NO: 572 - DNA, 247 bp, Homo sapiens
atcaagggaagaaggaggaatgctggactggaggcccctggagccagatggcaagagggtgacagcttcctttcctgtgtgtactctgtccagttcctttagaaaaaatggatgcccagaggactcccaaccctggcttggggtcaagaaacagccagcaagagttaggggccttagggcactgggctgttgttccattgaagccgactctggccctggcccttacttgcttctctagctctctagg

SEQ ID NO: 573 - DNA, 274 bp, Homo sapiens; identical to SEQ ID NO: 406

SEQ ID NO: 574 - DNA, 497 bp, Homo sapiens
  misc_feature 418, 428, 430, 434, 484: n = A,T,C or G
aaagcaaaagaggatgtatgagcagcagcgggacaatcttgcccaacagtcattcaacatggaacaagccaattataccatccagtctttgaaggacaccaagaccacggttgatgctatgaaactgggagtaaaggaaatgaagaaggtatacaagcaagtgaagatcgaccagattgaggatttacaagaccagctagaggatatgatggaagatgcaaatgaaatccaagaagcactgagtcgcagttatggcaccccagaactggatgaagatgatttagaagcagagttggatgcactaggtgatgagcttctggctgatgaagacagttcttatttggatgaggcagcatctgcacctgcaattccagaaggtgttcccactgatacaaaaaacaaggatggagttctggtngatgaatttngnttgncacagatccctgcttcatagatttgcatcattcaagcatatcttgtaaanaaacacatattat

SEQ ID NO: 575 - DNA, 232 bp, Homo sapiens
aaatgagcgtaaaaggccctctaacctatgcaggtttccccattatgcatatagaaaatgctagtatgttttgctcacttcatatgtaacaggtgcccttatgttgtgctgtatcctgtgctttttctgtgggaccattccattcaggagcaaagagcaccatgattccaatcttgtgtgtgtttactaacccttccctgaggtttgtgtatgttggatattgtggtgtttt

SEQ ID NO: 576 - DNA, 324 bp, Homo sapiens
ctggcaattggtttctgtgatgagtcgggcatcatggctgacaacgatcacagcacccttgtattcattgatggcctcccctagagcatcaatagactctatgtccaggttattggttggctcgtccaagatgaggacatcaggttcccgacaggccagctcagcaaacacaactcgcgccttctgaccaccagagagtttgcagatctggatggtgtgggcgtgactctccaggccgaagcggcccaggcacttgcgggcatcctggtagggcaggttgaagccccgctgcaggtactcagtgggcgtctcctccatgcgcag

SEQ ID NO: 577 - DNA, 552 bp, Homo sapiens
ctgaccagcaccatggcggttggcaagaacaagcgccttacgaaaggcggcaaaaagggagccaagaagaaagtggttgatccattttctaagaaagattggtatgatgtgaaagcacctgctatgttcaatataagaaatattggaaagacgctcgtcaccaggacccaaggaaccaaaattgcatctgatggtctcaagggtcgtgtgtttgaagtgagtcttgctgatttgcagaatgatgaagttgcatttagaaaattcaagctgattactgaagatgttcagggtaaaaactgcctgactaacttccatggcatggatcttacccgtgacaaaatgtgttccatggtcaaaaaatggcagacaatgattgaagctcacgttgatgtcaagactaccgatggttacttgcttcgtctgttctgtgttggttttactaaaaaacgcaacaatcagatacggaagacctcttatgctcagcaccaacaggtccgccaaatccggaagaagatgatggaaatcatgacccgagaggtgcagacaaatgac

SEQ ID NO: 578 - DNA, 198 bp, Homo sapiens
cctgacagacagaagggcttggagattttttttctttacaattcagtcttcagcaacttgagagctttcttcatgttgtcaagcaacagagctgtatctgcaggttcgtaagcatagagacgatttgaatatcttccagtgatatcggctctaactgtcagagatgggtcaacaaacataatcctggggacatactgg

SEQ ID NO: 579 - DNA, 457 bp, Homo sapiens
ctgccttggagtcgccctcagcagagatgatggccgccttttctgttgctcagccttttccaccacaaatctggccctctctgcttcctgctgagccacctgtttggcttccaccgcttctgtgaactccttcccgaaggtcagatgtgtcaaggacacgtcatccaggatgagcccaaaggtggcggctcgctctgtaaggtcgtcgctcacctgcctggagaccagctctctctgggtgattagttctccagcatcaaagcgagccaccactgacttgaggatctcagttgtgatggacggcagcacacgctcatcatagtcctctccgatgctggtgaagatgcgaggaagctggctggcgacaggccggaagaggatgcgcagtgtgatgttgacattctgtaaatctttgctaccagtgatgactggcacattacgtggtcgagaacggcag

SEQ ID NO: 580 - DNA, 416 bp, Homo sapiens
  misc_feature 14, 118, 147, 150, 151, 202, 341: n = A,T,C or G
ctgatatctcctcntgctatcctcaaactgccactcttaactcttgaagtaaataaataatctttgctggcaggactatgctgaacctccttaggcactctctaattagatgtcctangtcctcccaattcttagtccttttatatntgnntttctccttctcttattccatttagtttttcaattcatacaaaaccgtatncaggccatcaccaatcattctatacaacaaatgtttcttctaacgtccccacaatatcaccccttaccacaagacctcccttcagcttaatctctcccactctaggttcccacgccgcccctaatcccgcttgaagcanccctgagaaacatcgcccattctctctccataccaccccccaaaaattttcgctgccccaacacttcaacactat

SEQ ID NO: 581 - DNA, 470 bp, Homo sapiens
ccaaagggccaaaacaattaagaacacagtttgtgtcaatgtggagttaactgcagaacagtggaaaaagaagtatgaaaaagaaaaagaaaaaaataagatcctgcggaacactattcagtggcttgaaaatgagctcaacagatggcgtaatggggagacggtgcctattgatgaacagtttgacaaagagaaagccaacttggaagctttcacagtggataaagatattactcttaccaatgataaaccagcaaccgcaattggagttataggaaattttactgatgctgaaagaagaaagtgtgaagaagaaattgctaaattatacaaacagcttgatgacaaggatgaagaaattaaccagcaaagtcaactggtagagaaactgaagacgcaaatgttggatcaggaggagcttttggcatctaccagaagggatcaagacaatatgcaagctgagctgaatc

SEQ ID NO: 582 - DNA, 244 bp, Homo sapiens
cgagatcgtgccactgcactccagccttggcgacagactaagacgctgtctcaaaaaaaaacaaaaacgacaaaaaaaaacaaaacagaaaaaataaactaaggcaatgacagtccctggcaaatgctgggagggaggcagcagtggtcagggaaggtaaccctgaagcaggacttgtaaagcaaataagattgggaggccaaggtgggtggatcacgaggtcaggagttcgagaccggcctgg

SEQ ID NO: 583 - DNA, 422 bp, Homo sapiens
ctgggtttcaccaccaacctcagtgcctaccagagcgtgcaggagacctggctggccgccctgatcgtgttggcggtgcttgaagccatcctgctgctgatgctcatcttcctgcggcagcggattcgtattgccatcgccctcctgaaggaggccagcaaggctgtgggacagatgatgtctaccatgttctacccactggtcacctttgtcctcctcctcatctgcattgcctactgggccatgactgctctgtacctggctacatcggggcaaccccagtatgtgctctgggcatccaacatcagctcccccggctgtgagaaagtgccaataaatacatcatgcaaccccacggcccaccttgtgaactcctcgtgcccagggctgatgtgcgtcttccagggctactcatccaaagg

SEQ ID NO: 584 - DNA, 210 bp, Homo sapiens
ctggaagatgtcactgagtttgaaatcacaccagaaggaagaaggattactaaattagatcagattttgctaaatggaaataatataacaatgctggttcctggaggagaaggacctgaagtgtgaatgagtttccttgacttacactagattttgttttggcttataatgacaagaaaatggaattttttttcccactttctaatgttt

SEQ ID NO: 585 - DNA, 214 bp, Homo sapiens
aaaaagctagacacagtaaagacgtggttgggtttctgaaggcttataatggaaatagtctctagtctccagtcaggtaacatgccgcggtatgacactcccataagaacccccacccccctgccacccacttagtgtttttactcataaaaatgaggggaaaacttttctacatcagacaaatcacacagaggaaatattcacatgcagcttt

SEQ ID NO: 586 - DNA, 644 bp, Homo sapiens
aaattatttccatagtcttaaaaaatatgtaatgtcagaatgcatataaaaagaatgtaaaaggaaacctaaaatacaaatggaataatgtaacaaataaatatttgatttcagtaactgttaataatcagctcaacaccaccattctctctaaactcaatttaattcttataggaataatgaactgtcaaatgccatggcataattatttatttccaagctatcatcaatgattagaactaaaaaaattttggcataaaaaaatcacaattcagcataaataaagctatttttagcttcaacactagctagcatctctaagaattgttgaaataagtactataaccttgaaaattttcgacctggtgtctagtgttaagtgaaagtaatgcattttttttaagtgaaaagcttcttacattatttcacagacagtattacccaccccacattatgaatagttagatatattttatgtactttatacccacatgtatgacgcatgacatttggttcctgtagtacagatcacaatgttgttttcctgaatgggaaaaacttaaaaaaaaaaaaaaaaagggaagtgtacctgtgcacatttcaagatagcagcactcagtccatgccctattatccatcttaaa

SEQ ID NO: 587 - DNA, 162 bp, Homo sapiens
ctggcaagtccacaagccctgctggggccctgcttgttggcctgacccctccctcaccaggcagccagccaaggtggttcctgcttcacccactcagtcatcagcctcaggctgcccaaaatgcctctgacaccagatttatatcttctgggcggcttcttt

SEQ ID NO: 588 - DNA, 438 bp, Homo sapiens
ccagggtgccacaaacccaaagcaaagtttcaaaataatataaaatttaaaaagttttgtacataagctattcaagatttctccagcactgactgatacaaagcacaattgagatggcacttctagagacagcagcttcaaacccagaaaagggtgatgagatgagtttcacatggctaaatcagtggcaaaaacacagtcttctttctttctttctttcaaggaggcaggaaagcaattaagtggtcacctcaacataagggggacatgatccattctgtaagcagttgtgagggggtagagatgggacaaaattttggtctcagaggtcttaccatcttaatttggtaacttctaatgaaaaaaataaaaaatagaaataacattatccaaagatatcttaaagctgaaaacttgaacagcacattttttgttttt

SEQ ID NO: 589 - DNA, 150 bp, Homo sapiens
ctgttgcagcatccagttcatcttaagaatgtcaacgattagtcatgcaataaatgttctggtttttgcgctatctcagcagacctcacttgccccatggccttcatggcgcgctccaggcctcagacccttctctgtgttccgtcctgg

SEQ ID NO: 590 - DNA, 99 bp, Homo sapiens
aaagaaatataacgtagaataccaagaatatttgcaaagcaaaaacaaatataaagctgaaattctcaaaaaattggagcatcagagattgatagaggc

SEQ ID NO: 591 - DNA, 363 bp, Homo sapiens
  misc_feature 257, 294, 306, 352, 354, 359: n = A,T,C or G
cctggccgccaggcagaatgacaccccaagccaggcgttcgaggggctggggcagctctcctaaaatgaccctctgccaatgacaccacaccctcagtcccttcacacagaacgcggtaatttctgtaacttgtttccttaccccccagaagcagcaatcaccccatcagcaaagttgccggcaggcagagctcccaatttgggctttcggtgtgcagcgctccgtgtctaaccagcacagggactgtcggtacctnctggggacggggacagggacaggccctcatgtccttncaccaaatcttncaaaggcccccgggaaaaagccgtcaatccgggaacagccaccttntngcctnctgg

SEQ ID NO: 592 - DNA, 375 bp, Homo sapiens
  misc_feature 375: n = A,T,C or G
ctggttcaccacacggcgttctacctcatgtttgatggagcgggcgccatagtgcacattgtagccgtcgaccagcacatctgccacctcgcggtcccagagcagcgtgatgttgtgcctttgcttggctctcttggcccagaagtttagttccttgttgacgagttggatgagctccgagtggcagaagggggaggaagtagacgatctcattgatccgtcccagaaactcatccctccggaagtgagctttcaggatagggcgaatcacattctccttgaagttctttgagatggtgatcttgtcacttatctggacatcccccaggttttcggcaatacggttacggtcatctccaaagcttcctgcctcan

SEQ ID NO: 593 - DNA, 316 bp, Homo sapiens
  misc_feature 196: n = A,T,C or G
cctcgctgtgtgagcgccgagcactccaggtattttacagcaccaatctccttagccatggctagaccctgcggataggtgatgggagtcagcttcttctccttcagtttctcgatcgtgtctttatcatccctaagatcaagtttagttcccactaggatgatgggagtgttgggacagtggtgccgcacctcangataccactttgcacggacattttcaaatgatgcaggactcacaagggaaaagcaaattaagaacacatctgtttgcggataggatagggggcgtaatctgtcataatcttcttgtccag

SEQ ID NO: 594 - DNA, 475 bp, Homo sapiens
  misc_feature 345: n = A,T,C or G
gccgagccacatcgctgagacaccatggggaaggtgaaggtcggagtcaacggatttggtcgtattgggcgcctggtcatcagggctgcttttaactctggtaaagtggatattgttgccatcaatgaccccttcattgacctcaactacatggtttacatgttccaatatgattccacccatggcaaattccatggcaccgtcaaggctgagaacgggaagcttgtcatcaatggaaatcccatcaccatcttccaggagcgagatccctccaaaatcaagtggggcgatgctggcgctgagtacgtcgtggagtccactggcgtcttcaccaccatggagaangctggggctcatttgcaggggggagccaaaaagggtcatcatctctgccccctctgctgatgcccccatgttcgtcatgggtgtgaaccatgagaagtatgacaacagcctcaagatcatcagcaatgcc

SEQ ID NO: 595 - DNA, 348 bp, Homo sapiens
ctgagtctgcttaaaaaatcatccaaagcagaccgactctcctacagctcggagctgtgtatcttattgccagtaccacaacagtcctgcccgaatatatcatcagcggcctactttctcccttccctccaagcctgttcctttcccaacaatacccgtctttgttccccggaatgaagaggggcttttcttcctgcacatcgctatttgataacagcgagtgcctccccatgcactggaatccactgtgtgtgctgtcgtgtctcctactggcctcttcgatctcagcaaaaccaaagtgctgtgctacctaattgcttttttcttttttcctttccactttctgtt

SEQ ID NO: 596 - DNA, 120 bp, Homo sapiens
ggcggctgggaccctgtacacgtatcctgaaaactggagggccttcaaggctctcatcgctgctcagtacagcggggctcaggtccgcgtgctctccgcaccaccccacttccattttgg

SEQ ID NO: 597 - DNA, 578 bp, Homo sapiens
aaacaaattgcagagaatagagaaaaaaataggttatttacagaaaacaatatctacatatgtacttagaggtacaaatttggtgacagaaaagacttcagtatatgctggcatcttagaagcagttctcaaagagcttagttttattttcttgaattttaagaatgcctaagatccttcttcatcctcgatcttgggagccaagtagtattttaagtgtcccatatccgcaattttatactctacaacaaggggtacatctgcagacatactgagtgtcaccgttgaagagagtggagtggcttttgtaaagaagttcaggtacctcagtgcaaaagttagttgaactggttcattcatctctatggtaacagcttcctcctctttatcgacattacttgtctgtgacaatttaatgtttccatttccaagttctccacttgcagaaaatttcactccgtcttttgcacaggaaattacaacagcatctccaatatggctgagatctcggcatatacgtgcaaattcaccagaaggcatctttactacacagtgacccacgatgcagtgcatgcaca

SEQ ID NO: 598 - DNA, 169 bp, Homo sapiens
ctgcttgccagcaaagatcagtctctgctgatcaggaggaattccttccttatcctggatcttggcctttacattttctatcgtatccgagggttcaacctcgagggtgatggtcttccccgtaagggttttcacgaaaatctgcattttggtggcggctccaccgcag

SEQ ID NO: 599 - DNA, 513 bp, Homo sapiens
  misc_feature 444: n = A,T,C or G
aaatgatttaagttcatttgttctcaaccttggggtaaactgaggtattttgcttcctgggaagatcttcgcaattttgagtgctcctgtggggagcggggatgagctaaagatacaatgtttccctgccccgcaccgcttccacaaaatagcaatgtggttttgcagctctgacttctgctcccagtaacccatcgttagggcactctagcactatggaggtacccaaggctcagccagtctctatttaagaaaatttaacaaatacgagtaaccctgtcccaatcactgaatctctagttactactcttagaaacacctgtggcttcttggccctcctgttgcccgctctgaatctctctgcagtctacaaaatcgccccagtcaactctccacttggagggaattgtccagtgtggcccctagaattgagtcaccccctanataccaactgtctgaccccgaggagctctgtaagtccctgctcctcctcttccctttggggctggtgct

SEQ ID NO: 600 - DNA, 395 bp, Homo sapiens
ccagggtgcttttggaaacatgtgtcgtggaggccgaatgtttgcaccaaccaaaacctggcgccgttggcatcgtagagtgaacacaacccaaaaacgatacgccatctgttctgccctggctgcctcagccctaccagcactggtcatgtctaaaggtcatcgtattgaggaagttcctgaacttcctttggtagttgaagataaagttgaaggctacaagaagaccaaggaagctgttttgctccttaagaaacttaaagcctggaatgatatcaaaaaggtctatgcctctcagcgaatgagagctggcaaaggcaaaatgagaaatcgtcgccgtatccagcgcaggggcccgtgcatcatctataatgaggataatggtatcatcaagg

SEQ ID NO: 601 - DNA, 309 bp, Homo sapiens
tgacagttgaattgacacttttattggggcagaatggaacagtccaagaatgtagatactgattctttctccataaatgttcttatagtgtgttcatcctagagttatttttttgtttgtttttttcctttttggatcttgattgataactgccatgatattttgctttgatgtgtttctacatgtagttgcacacggttcagtaaaaataatgctgctatcgagtatgcaaatattgaagtatgatggtttgactgtatggcagtgttgtagcagcctcttgtttttttccccattgcctcttttttt

SEQ ID NO: 602 - DNA, 562 bp, Homo sapiens
gagaagggcaggatcagaagggaccttggcacagcgacctcatcccccaagtggacacggtttgcctgctaactcgcaaagcaattgcctgccttgtactttatgggcttggggtgtgtagaatgattttgcgggggagtggggagaaagatgaaagaggtcttatttgtattctgaatcagcaattatattccctgtgattatttggaagagtgtgtaggaaagacgtttttccagttcaaaatgccttatacaatcaagaggaaaaaaaaattacacaatttcaggcaagctacgttttcctttgtttcatctgcttcctctctcaccaccccatctccctctcttccccagcaagatgtcaattaagcagtgtgaattctgactgcaataggcaccagtgcccaacacatacagccccaccatcatccccctctcattttataaacctcaaagtggattcactttctgatagttaacccccataaatgtgcacgtacctgtgtcttatctatattttaacctgggagactgttgtcctggcatggagatgaccatgatg

SEQ ID NO: 603 - DNA, 436 bp, Homo sapiens
  misc_feature 340, 410, 419: n = A,T,C or G
atttcctgtgctagagtccaatatttgagtctctcgtgcaaatgagactattctttgtggtacaattccacctatcatatgtgaaaactgcagtaaaaataaacccagatgctaaatcattcctacaaaggtttgactgaaactgtggcagatgtctcatcttctttatatgttaagcagcatactcttctgatttttattgcaatcttttaccaagtggtgcacaaacttggtattgatgtctttattccattttgagtttagattgagaatatttttattttctgaaggcagagatatctactgtataattgcaccaaagtacatttgaaaggaaggntttcaatagtgtaatactgcagcgatgtagataaaatcacaaatgtataatgtgttaggttgaataaggngtggaaaantgcttttctgttagtag

SEQ ID NO: 604 - DNA, 505 bp, Homo sapiens
cctttttggacaggtggtgtgtggtggccttggtatgtgctttctcgtgttacatcgcgccatcattggtatatggttagtgtgttggttagtaggaaaaaaaaagtattcagcaccatttgctcataggtctttcagagtttgttcttaaagtttctggaactttcctgtctgtaaagtaacaggaattactgagctacattggaaagcctctctgggacaggcagtggggagttaagcagtcatcataaaggaatcagtgtacattcagcatggtgacttgactacacaacaatcccttcccctctactgtagctcaagagagacatgcttctaaccactgaggtatgaggagtctcagactgttatttgctgttagaattggtcttcccagctaataacagtacatctctggcacagatgctattggtccttaatgtcctgtgattttaggaaatagtttggatttagttcaatttattcagaaaccaaacgtgtttaatta

SEQ ID NO: 605 - DNA, 417 bp, Homo sapiens
aaaaggtgactagacatacttggaagttcaaagcagtaggatgtagcttgcagggaaaagaaaacccttttccatgttgttaggcagaagtatatcaaatatatcccaattccacttgataaagtcagttggatgacctccttgaaccaatctagggcagaacacttagtaaaagcgggccctggtggggatgtgaatccaggagaagaggggcaccagatcccatgcagcgccaaacacatccattccaccctctaacacatacgaggcatgtcaccccatgtccctggacacaagatccacaagaacagtcagcagatggtcactgctcccacggcctggtgctttctaatggtcttaattcaggccatggagaaaatcctttaccaccaaacacaaactgtcattgaacttcag

SEQ ID NO: 606 - DNA, 258 bp, Homo sapiens
  misc_feature 225, 258: n = A,T,C or G
ctgactgttgagagagcagcacatcattttatcattttatcttctttggactacaggtggggtgggagggatttgggttggtggattaacagatggaattgaggagagagtaggatgctgattttcctacccgtggcccaggtctgtgccttccccatgccaaggactctaggtcaaatgtcaataaatatgaacctcgagaaagttctgaaggccatgaaatanaaaaaaaaaaaaaaaaaaaaaaaaaaaaagctn

SEQ ID NO: 607 - DNA, 92 bp, Homo sapiens
  misc_feature 76, 78, 83, 85, 87: n = A,T,C or G
aaataaaagtccagctataaggaagcagtctgtgcagtgtgtgggtgagtggatgggaacgtgtgtgtgtggtgtntntggtntntntgtgt

SEQ ID NO: 608 - DNA, 489 bp, Homo sapiens
aaagaatcagcaaaatttcaaataaaaaattatgaaaatattatcctcattagttcatttagtcccatgaaattaattattttctctgcttgatcttggtggacagtttcatgaagctgtcagttagttcattaaagttttggaaattctcagacagtgcagtggtatcagaaacttgtattcaagagtacaggtcagagtcttcttttcttttctttttgagatggagtcttgctctgttgccagactggagtgcagtggtgcgatctgggctcactgcaatctccacctcccgggttcaagcgattctcctgcctcagcctcccgagtaactgggactacaggtgcgcgccaccaagcccagctcatttttgtatttttagtagagatggggtttcacgatgttggctaggatggtctcgatctctggtcagagtcttttctgtaaatatccttggtaaagaagcaattttagactgtagctgttgc

SEQ ID NO: 609 - DNA, 394 bp, Homo sapiens
cctcgggtgttggagggcaaaggtgacagcatcatggacagaggcaaagagatgcttcttggtgatggatgcatcgaagaagtgcccagcctcaagctggctgaccacagggctgtggcaggccgccatgtacacctccacctcaatctcccggaagtcatggaaaatattcttcaggctcttgaggcacacagtgtccacaaaggagagggcacccaggtccaggatgaggctgtggaagtctggctgaggcaggcccagggccttcagtgtggacccatctggggccttggagtcttcttgaccattggctgttgcatcttccatcttatctcctgagctcaccatcatcttgcagtcctcaacgttgttgctcctcatgtcttcaaggctg

SEQ ID NO: 610 - DNA, 234 bp, Homo sapiens
ctgaaaatccatcagtgccagcataccaatgaacctctattcaagtgtacccaggaaggatgtgggaaacactttgcatcacccagcaagctgaaacgacatgccaaggcccacgagggctatgtatgtcaaaaaggatgttcctttgtggcaaaaacatggacggaacttctgaaacatgtgagagaaacccataaagaggaaatactatgtgaagtatgccggaaaacattt

SEQ ID NO: 611 - DNA, 415 bp, Homo sapiens
  misc_feature 28, 56, 66, 67, 80, 124, 206, 211, 255, 257, 268, 275, 297,332, 348, 362, 370, 377: n = A,T,C or G
cttttttttttttttttttttttttttngaaaagtcatggaggccatggggttggnttgaaaccanntttggggggttcnattccttccttttttgtctaaattttatgtatacgggttcttcnaatgtgtggtagggtggggggcatccatatagtcactccaggtttatggagggttcttctactattaggacttttcgcttcnaagcnaaggcttctcaaatcatgaaaattattaatattactgctgttananaaatgaatgancctacanatgataggatgtttcatgtggngtatgcatcggggtagtccgagtaacgtcggggcnttccggataggccganaagtgttgtggganaaagttanatttacnccgatgaatatgatagtgaaatggattttggcgtaggt

SEQ ID NO: 612 - DNA, 307 bp, Homo sapiens
ccactttactaaacatgaaaatgttgcctatatgttgctccacagtgatggatctgcggttcttcatcatcacaatggcactgagaaacatcaggatctccacttctcttcagtcaaagtcacacgggttaccgtcttcgcgttgggtgggcagaccgtggcagagcggcggcagtttcctcacgagtaggaaggcagcagagagcagggccgacagaaggtagtaaggttgggcgagccatcgtgaaagtcgcggcaccgaatacacgagagcaattagaggtgccaagaccgccatcttttcggc

SEQ ID NO: 613 - DNA, 303 bp, Homo sapiens
ctgcctcccggcagtccaggaaaactgcaaaaaatgggaagtaaggtcctggcaggcagacccggcatgtagccgctggccatcttgaatcctagggcatgaagttgccccaaagttcagcacttggctaagcctgatgcctctggtttatcacaaagaataggatgggataaagaaagtggacacttaaataagctataaattatatggtccttgtctagcaggagacaactgcacaggtatactaccagcgtttggatattgatatatacatggcaaatctgaatattgttttatgagagg

SEQ ID NO: 614 - DNA, 282 bp, Homo sapiens
cctccagccaggagtgcatcaacgtgcttctgcagtacggctgccccgacgagtgcgtgtagtatctgttttatttgactgcagtctccttggtgcaaaaacaaaatgggaaaaataaggataactcagaatttcaaaaggaaatcacaaattcagctagtaatagcattttcagtacttttcgtaaactaagtaaatacacaaaatgttgatttttctgaccataagacatattttatgtccttttgccaaggtggatgtgttagtctcaggccctcctgg

SEQ ID NO: 615 - DNA, 468 bp, Homo sapiens
ccacaccttccaggcacttggcctgatgccccgccctggtgctctccccaggctccctcctcagcctcctgcccacccagggccctttactctcttctccctccagaccttcctctgacccttgctgaactggggtccctttgtgagtgtctcagtctagaggtacctccctccctggggggtctcagctcctggagtcgcaggcccttggggcccctctgtgagatctcaatgctgtctggggaccctaagagttttctcacctgttcagtctcatctaaccttccaatgtctgatgttcctgccaaattcctgcctgattctgggtccgtcctgacctccaaaggtcagcttggtgcttgaggtctccctgctcttggtggcagtggtagcagcaacagcagcagcagcagcagcagcagcagcagagacctctccactttcccttaacccctctgctgggtagag

SEQ ID NO: 616 - DNA, 319 bp, Homo sapiens
  misc_feature 313, 315: n = A,T,C or G
ccagataaggctgacttcagtgctgatgcaagttcctttttggtccttctctggtaggcgaaggcaatatcctgtctctgtgcattgctgcggttggtcaaaatgttgacaatggtgacctcatccacacctttggtcttgatggctgtttcaatgttcaaagcatcccgctcagcatcaaagttagtataggctttgacagacccatatgcacttgggggtgtagagtgatcaccctccaagctgagcttgcacaggatttcgtgaacagtagacattttgaaggaagctgggccgtgcgccgagagctganancgtc

SEQ ID NO: 617 - DNA, 406 bp, Homo sapiens
cctgcaccagctcttgggtggtaaacactctatagagctcctctggtgacgtcaggaaggtttccttaagagtgatcttacaagtggggattttgactccaacaggtctggcctgggtttttgaaggagcaggcttagccttgcgctcctcagttttcagtgctggctgccccactgggtctactgactctccattcattgtaggtaagatcatgccctgggtgaactctgttttgagggtgctgatgtaaattcccattgcttctcttagaagtttcaccccttcttccttcattaaggccacgagatttgtgtcaggctcatctttggcaaggctcacactaatctccacttcatccacgctgttttcatcagacaaattggggatctccacatgtcctttgta

SEQ ID NO: 618 - DNA, 485 bp, Homo sapiens
ccacagaagttgctgctgacgctctgggtgaagaatggaagggttatgtggtccgaatcagtggtgggaacgacaaacaaggtttccccatgaagcagggtgtcttgacccatggccgtgtccgcctgctactgagtaaggggcattcctgttacagaccaaggagaactggagaaagaaagagaaaatcagttcgtggttgcattgtggatgcaaatctgagcgttctcaacttggttattgtaaaaaaaggagagaaggatattcctggactgactgatactacagtgcctcgccgcctgggccccaaaagagctagcagaatccgcaaacttttcaatctctctaaagaagatgatgtccgccagtatgttgtaagaaagcccttaaataaagaaggtaagaaacctaggaccaaagcacccaagattcagcgtcttgttactccacgtgtcctgcagcacaaacggcggcgtattgctctg

SEQ ID NO: 619 - DNA, 386 bp, Homo sapiens
ccaattgaaacaaacagttctgagaccgttcttccaccactgattaagagtggggtggcaggtattagggataatattcatttagccttctgagctttctgggcagacttggtgaccttgccagctccagcagccttcttgtccactgctttgatgacacccaccgcaactgtctgtctcatatcacgaacagcaaagcgacccaaaggtggatagtctgagaagctctcaacacacatgggcttgccaggaaccatatcaacaatggcagcatcaccagacttcaagaatttagggccatcttccagctttttaccagaacggcgatcaatcttttccttcagctcagcaaacttgcatgcaatgtgagccgtgtggcaatccaa

SEQ ID NO: 620 - DNA, 445 bp, Homo sapiens
  misc_feature 351: n = A,T,C or G
aaatgccatgatccaggatggattttagatcttgttgaaagcagccacatccatggactgcacatagtcctcaaaagcagtgatctgctcctccagcatatctgttccaactttatcatcttcaactacacactgtatttgaagtttcttaattccgtatcccactggaactagtttagatgagccccagactaagccgtctgcttgaatgcttctgacgcactcctctaatttcgccatatctgtctcatcatcccaaggtttcacatctagtaagatggaagacttggcaacaagtgcaggttttttggctttctttgattcatattgtgcaagacgttcttcccttancctctttgcttcttcactttcctcctcatcatcagatccaaagaggtcaatgtcatcatcatctttactatctgtagctccacttcctgtagtg

SEQ ID NO: 621 - DNA, 362 bp, Homo sapiens
  misc_feature 300, 308: n = A,T,C or G
cctgctgggaacgggacttctaaaaggaactatgtctggaaggctgtggtccaaggccatttttgctggctataagcggggtctccggaaccaaagggagcacacagctcttcttaaaattgaaggtgtttacgcccgagatgaaacagaattctatttgggcaagagatgcgcttatgtatataaagcaaagaacaacacagtcactcctggcggcaaaccaaacaaaaccagagtcatctggggaaaagtaactcgggcccatggaaacagtggcatggttcgtgccaaattccgaancaatcttnctgctaaggccattggacacagaatccgagtgatgctgtacccctcaaggattt

SEQ ID NO: 622 - DNA, 352 bp, Homo sapiens
  misc_feature 20, 86, 141, 218, 242, 296, 301, 321, 337: n = A,T,C or G
cctgctgggaacgggacttnctaaaaggaactatgtctggaaggctgtggtccaaggccatttttgctggctataagcggggtctncgggaccaaagggagcacacagctcttcttaaaattgaaggtgtttacgcccganatgaaacagaattctatttgggcaagagatgcgcttatgtatataaagcaaagaacaacacagtcactcctggcggnaaaccaaacaaaaccagagtcatntggggaaaagtaactcgggcccatggaaacagtggcatggttcgtgccaaattncgaancaatcttcctgctaaggccnttggacacagaatccnagtgatgctgtaccc

SEQ ID NO: 623 - DNA, 377 bp, Homo sapiens
ccaaatgtgttacttgtgcaccaaagagttttttaaaaagagatttgcctacgggtgagcactgaagtatacattgtgccaatgtaattattgtcttggagaccttctagaacttgctaaatcatatagcaagaagagaatgagttcaggcccagtaaatctggtgagttaatttacatctgtgatactgccgtttttcccattaaatgtggttatggcaaagcattcttagggtaataaataaataaataaactttggacaatgcctttacttgtgccctatatacagaactattccatagaattttccaggatttcaagatactacacaaagaaaaaaactgtaaagcaatttggtcctttccaaatttcagcag

SEQ ID NO: 624 - DNA, 260 bp, Homo sapiens
ctcgtcgctgcagcgacacacgccctcgccgccgccatgactgagcagatgacccttcgtggcaccctcaagggccacaacggctgggtaacccagatcgctactaccccacagttcccggacatgatcctctccgcctctcgagataagaccatcatcatgtggaaactgaccagggatgagaccaactatggaattccacagcgtgctctgcggggtcactcccactttgttagtgatgtggttatctcctcagatgg

SEQ ID NO: 625 - DNA, 441 bp, Homo sapiens
ccactgcagatggaaacctctcagtgtcttgacatcaccctacccaggcggtgggtctccaccacagccactttgagtctgtggtccctggagggtggcttctcctgactggcaggatgaccttagccaagatattcctctgttccctctgctgagataaagaattcccttaacatgatataatccacccatgcaaatagctactggcccagctaccatttaccatttgcctacagaatttcattcagtctacactttggcattctctctggcgatggagtgtggctgggctgaccgcaaaaggtgccttacacactgcccccaccctcagccgttgccccatcagaggctgcctcctccttctgattaccccccatgttgcatatcagggtgctcaaggattggagaggagacaaaaccaggagcagcacagtggggaca

SEQ ID NO: 626 - DNA, 476 bp, Homo sapiens
ctggggccactgtcggcatcatgattggagtgctggttggggttgctctgatatagcagccctggtgtagtttcttcatttcaggaagactgacagttgttttgcttcttccttaaagcatttgcaacagctacagtctaaaattgcttctttaccaaggatatttacagaaaagactctgaccagagatcgagaccatcctagccaacatcgtgaaaccccatctctactaaaaatacaaaaatgagctgggcttggtggcgcgcacctgtagtcccagttactcgggaggctgaggcaggagaatcgcttgaacccgggaggtggagattgcagtgagcccagatcgcaccactgcactccagtctggcaacagagcaagactccatctcaaaaagaaaagaaaagaagactctgacctgtactcttgaatacaagtttctgataccactgcactgtctgagaatttccaaaac

SEQ ID NO: 627 - DNA, 607 bp, Homo sapiens
ccagaagataacattccatggtgaaggagaccaagaaccaggactggagccaggcgatattatcattgtgttagatcagaaggaccgtgctgtttttactcgacgaggagaagaccttttcatgtgtatggacatacagctcgttgaagcactgtgtggcttccagaagccaatatctactcttgacaaccgaaccatcgtcatcacctctcatccaggtcagattgtcaagcatggagatatcaagtgtgtactaaatgaaggcatgccaatttatcgtagaccatatgaaaagggtcgcctaatcatcgaatttaaggtaaactttcctgagaatggctttctctctcctgataaactgtctttgctggaaaaactcctacccgagaggaaggaagtggaagagactgatgagatggaccaagtagaactggtggactttgatccaaatcaggaaagacggcgccactacaatggagaagcatatgaggatgatgaacatcatcccagaggtggtgttcagtgtcagacctcttaatgggccagtgaataacactcactgctggcatttaatgtgcagtagtgaatgagtgaaggactgtaatca

SEQ ID NO: 628 - DNA, 278 bp, Homo sapiens
cctccgggtagaaggtgtgcatgtctccaccagtgtcatgtggcacctgcagatggcttctcgctggcacctgtcatgctctgcagacgtgcctggaaaagaagcttatgttgccttaaggtcatctttctcctttgagggagagtacagaagtcgtggcgacacccacagccaagccaggatcgttatctacgcgtgagcatgcagagcgggcgtgagatattcccgctgaatcaagctaaaaataacgcatccaagctgccgagttatgaaagcag

SEQ ID NO: 629 - DNA, 329 bp, Homo sapiens
ctgacagagacaccagcactcgctggaacatgaacgatgtgtcagagcgaatgtcatcttcaaggctccgtccatattgctgctggtaggtttggcttatgcgccggatctcctcaggggtccgggaggccaggatctcaattaggcagccctcatcagtgccggctcccttcatggcccttcgcagctcttgcacgtcatacagcaccgtgggcgtcatcatccccacaatcacctgctcgaagttgccactcagttctgacttcaggtcgtctatcaagtccctgccgatggtgctcttgtaggctgtcctgatctcctggcgctgg

SEQ ID NO: 630 - DNA, 465 bp, Homo sapiens
gcacggagatctcgccggctttacgttcacctcggtgtctgcagcaccctccgcttcctctcctaggcgacgagacccagtggctagaagttcaccatgtctattctcaagatccatgccagggagatctttgactctcgcgggaatcccactgttgaggttgatctcttcacctcaaaaggtctcttcagagctgctgtgcccagtggtgcttcaactggtatctatgaggccctagagctccgggacaatgataagactcgctatatggggaagggtgtctcaaaggctgttgagcacatcaataaaactattgcgcctgccctggttagcaagaaactgaacgtcacagaacaagagaagattgacaaactgatgatcgagatggatggaacagaaaataaatctaagtttggtgcgaacgccattctgggggtgtcccttgccgtctgcaaagctggtgcc

SEQ ID NO: 631 - DNA, 557 bp, Homo sapiens
ctggctaaacagatgattgggtacaatctagcgacaaaacaaactccaaaagaaggtgtgaaagttaacaaggtgatggttgctgaagccttggatatttccagagaaacctacctggcaattctgatggaccggtcctgcaatggccccgtgctggtgggcagcccctaggggggcgtcgacattgaagaggtggctgcttcaaacccggagctcatttttaaggagcaaattgacatttttgaaggaataaaggacagccaagctcagcggatggccgaaaatctaggcttcgttgggcctttgaaaagccaggctgcagatcaaattacgaagctgtataatctcttcctgaaaattgatgctactcaggtggaagtgaatccctttggtgaaactccagaaggacaagttgtctgttttgatgccaagataaactttgatgacaacgcagaattccgacaaaaagacatatttgctatggacgacaaatcagagaatgagcccattgaaaatgaagctgccaaatatgatctaaaatacataggactagatgg

SEQ ID NO: 632 - DNA, 324 bp, Homo sapiens
ccttggtgatgaggcccctcacagcttgtgcaatggcatccctgtcgataccaaacatcttcagcagctcagccggcttcccacttcttggtacccggttaactgccaggtgggtgacagtgatgccaggctcgcccactactgcactggacacagcctcaccaatgccaccttcataataatggtcctccacggtgaggatcctgcccttggtggcacgagcgctgtcgagaatgagttttctgtccaggggcttgatggtgaaggggtccagcacgcggatgttgatcctttctttcttcagcagttcggcagcggccaagg

SEQ ID NO: 633 - DNA, 534 bp, Homo sapiens
  misc_feature 528: n = A,T,C or G
ctgttagagtatttagagtcctgagataacaaggaatccaggcatcctttagacagtcttctgttgtcctttcttcccaatcagagatttgtggatgtgtggaatgacaccaccaccagcaattgtagccttgatgagagaatccaattcttcatctccacgaatagcaagttgcaagtgacgaggggtaatacgctttacctttaagtcttttgatgcatttcctgccagttcaagtacctctgcggtgaggtactccaggatggctgcgctgtacacagcggcagtcgcgcccacacgtccatgactggtcgtcctagattttaggtgtcgatgaatacggcccactgggaactgcaagccggctctctgcgagcgggaaaccgcctttgtcttggcctttccggagtcctttccagccttaccgccagccatttcgaattccgctgaagctcaagcaagcaaggcagagaaaaggctaatcggacccacggtgagatcccaccacctactccttcgtcgcaccgngacctg

SEQ ID NO: 634 - DNA, 500 bp, Homo sapiens
ctgactggttcctttaccaaggtttgcagagtaggttgtgtttgaacaccttctgtgggtctgtgtcatttccaagttgaagaatttcagccaaagagcaacatgtcacattgattaaagatggttaatgacacagaaacatttctgttaatactaagggaaaaggctgttcttttatttatttatttttcctgagtcctcacttttttcttctctgacaaatgtttgaaattcagtgaaataccaaaggagtcaaggatgaaggggacacaggatggaatcagaaaaaacataaatggaatccaggcagttctatgagacaacactgatatatctccttgataaagaaaaaatgtacagaatatttaatgagtctgtcttgccccaaaagggaaaaacacaagtagctaagccatttgcagagaggaaaaatgtcatggaaaaatgaaaaatctctctaatgtctatagcacatgaaatatctaagtaggtgggtgcag

SEQ ID NO: 635 - DNA, 547 bp, Homo sapiens
  misc_feature 499, 518, 527: n = A,T,C or G
aaaatcttattcaaaatattaaataatagtttcagatatgaaaaaattactgcaataaaacggttcaggggtatttccattgcgcttcccttccctattaggaaagtacactgtccgcccaagagacaggatggacggccttcttccagctctacataaagcgcaagcccactggctcacccgggtcctgcttaacatatattagggctatgttttctaaaaagctgtagtgacacttgtaagtcaaccatggttcaaatcacatatttacatattgatcaattctttatgatagaaagacagacataaatgaatcccatagtaaatactttccagttgccataaaaaacaaaaacaaagaaaacaagtgtgggggaaaaaaggtaattgtacacaaatatcctttatgtatacaaacaacttcattcaggtataattttaatttgaaagacctaggtacagtattatttaagtgataatgacccctaagatttattcnaatttactgtaaaataatnaacgaagtnaacgaatctgatataatttt

SEQ ID NO: 636 - DNA, 185 bp, Homo sapiens
gtcgaagcgaggacgtggtgggtcctctggtgcgaaattccggatttccttgggtcttccggtaggagctgtaatcaattgtgccgacaacacaggagccaaaaacctgtatatcatctccgtgaaggggatcaagggacggctgaacagacttcccgctgctggtgtgggtgacatggtgatgg

SEQ ID NO: 637 - DNA, 215 bp, Homo sapiens
ccaacctgcctctacagcgtccacagcgaacacagggctagacaagggaggagtttctcaaacggttttaatcggttctctccgcgtcacaagccatcgggtaaggcaacggaatgtgcgtggggtcccctgtggctccgcggtcacaatactgagcctggaattgctgttagcaaaatatacatttgcgtcaccataaaaaaccgcgccgccgc

SEQ ID NO: 638 - DNA, 350 bp, Homo sapiens
aaaaaagaaaagacagtgaacagaaactgctacctaaggattctagaggcaatgagacacagagtcctgtttttcaggacagaccgtattgcccaagcctctagcatttacggagcataaattaagaatcttgttttgccttgagtctcaccatgaaataatgacacggtagccacatttgctgagggcctaatatgtaccaggcattgtgctaagtagtttcatatccatgtctcatttattccgaacttttttcctcagggagagaaaaatcaattacagtcttgttcataggaaaaaccaaacttacaattttgggaaagcaagaacatgtacagtagaggaggagg

SEQ ID NO: 639 - DNA, 328 bp, Homo sapiens
aaagctttgaaaagctactacttttacttctaatacatccagatgaacacgatgtagcaatatcagcttgtattccagagaaatctcattagtttttctggtgatggaaccacttatccacgtctgttggtactgtgcaggcagattcacagggtggtggtaaagcatccacaatggctctggcagcatcaggatcacacttgaaggggctctcagacaaagttgtattcatgcaactgattccttttccattcgttttcttagtcactaatgctttccaatggtcatgagtgcttttaataatatcaatggcaaagtccttatcttt

SEQ ID NO: 640 - DNA, 453 bp, Homo sapiens
ccacaggtgcctgactaggagcccctaggtccccaggcttgagaaagggttaaaatagaacctccaggtagttttcttcctctacctccacatccccccaagactgaaaagagtcactaactctcttttcccaagccttttataaaactgcaggaacactgtggagatggttcctatctggggtccttttggggacatatgcctcagtcagtcattcagtgattgatccaaaattatttactgagtgcctacctactctgcgccaggctctctagcctctcactactgagttagggtgcaggcagaggctggggcagaatgtttacagccagtgccagcacaaggtagtaatctagtgacagagaacagggtgttatggggagcatatgagaggccatctatcccagcctgggtgatcctggagagtttcccagggttgtgatatgtggcagg

SEQ ID NO: 641 - DNA, 485 bp, Homo sapiens
cctgctgggcttggcaacgagggactcggcctcggaggcgacccagaccacacagacactgggtcaaggagtaagcagaggataaacaactggaaggagagcaagcacaaagtcatcatggcttcagcgtctgctcgtggaaaccaagataaagatgcccattttccaccaccaagcaagcagagcctgttgttttgtccaaaatcaaaactgcacatccacagagcagagatctcaaagattatgcgagaatgtcaggaagaaagtttctggaagagagctctgcctttttctcttgtaagcatgcttgtcacccagggactagtctaccaaggttatttggcagctaattctagatttggatcattgcccaaagttgcacttgctggtctcttgggatttggccttggaaaggtatcatacataggagtatgccagagtaaattccatttttttgaagatcagctccgtggggctggttttgg

SEQ ID NO: 642 - DNA, 276 bp, Homo sapiens
  misc_feature 1, 13, 16, 17, 267, 270: n = A,T,C or G
ncatgctacgcanagnnagatggcgcccgcgtaatggctgggaaagtggagatgacattggaaatcctcaacgagaaggaggccgacgagaggccagccgggaaggggcgggacgaacccaacatgaaccccaagctggacttaccaaatcgaccagaaacctccttcctctggttcaccaacccatgcaagaccatgaagttcatcgtgtggcgccgctttaagtgggtcatcatcggcttgctgttcctgcttatcctgctgctnttngtggcc

SEQ ID NO: 643 - DNA, 305 bp, Homo sapiens
cctgctagaatcactgccgctgtgctttcgtggaaatgacagttccttgttttttttgtttctgtttttgttttacattagtcattggaccacagccattcaggaactaccccctgccccacaaagaaatgaacagttgtagggagacccagcagcacctttcctccacacaccttcattttgaagttcgggtttttgtgttaagttaatctgtacattctgtttgccattgttacttgtactatacatctgtatatagtgtacggcaaaagagtattaatccactatctctagtgcttgacttt

SEQ ID NO: 644 - DNA, 517 bp, Homo sapiens
aaaagtattttctctacagagaatcttatcagctatacaaaaatctgtacagtttttatactgaagctagtattgagctgcacttgaattcacattcttagcaaaataattgcctgagcacacacacacattccacacgcatcattaaaggatagccatttattcttcatcttcatcctcttcctcctcatcttcatcttcttcttcctcctcctcctcctcatcttctggttcgttcttcttctttgagcctgttggcctgccagggcccttctttcctgcttcacttttgcccttggcacgatatgcagcaatatccttttcatatttctcctttagcttagctgctttctgttcatatggttgtttatctttggctgactgctcagaccacatttcacccaatttctttgcagtatccccaatggataggccagggtgttcacttttgatctttgggcgatgttcagagcaaaacaggaagaaggcagatggtggccttttaggagcattgggg

SEQ ID NO: 645 - DNA, 484 bp, Homo sapiens
ctgtatggagcctacctccgcatccacgcgcacttcactgggctcagatacctgctatacaacttcccgatgacctgcgccttcataggtgttgccagcaacttcaccttcctcagcgtcatcgtgctcttcagctacatgcagtgggtgtgggggggcatctggccccgacaccgcttctctttgcaggtcgaaaggggcaaggacccccttttgtccctttgatctttgtgggtggtcaggggtatgttggggattaaggcatgagggtcctgattgttagtgagggaagtcagtcctggctgctcagtagtttttcctccacaggttaacatccaaaaaagagacaattcccggaaggaagtccaacgaaggatctctgctcatcagccagggcctgaaggccaggaggagtcaactccgcaatcagatgttacagaggatggtgagagcccctgaagatccctcagggacagagggtcag

SEQ ID NO: 646 - DNA, 325 bp, Homo sapiens
aaaaaaataataaggtctcatggcttcattcagagaccacagtaacaacagcagcccaccaatcagagaagctggttgttattaaccaagctacagattcacactttctggcctaaaccctaatgggatgaggcttttcaccccaggccatgctggtggtgattttttagcccctaaataaaacactggactatttcctgtttacttcattgattgcaactacaaaggtggactcaaagcaaagcacaatcatgccagccaacattccagaattctgctgagaactccaagtctgtgaggggagaggttttacaagccagacagg

SEQ ID NO: 647 - DNA, 566 bp, Homo sapiens
  misc_feature 535: n = A,T,C or G
ctgtttcccatgggccaccaggcggctcaggacagcaaacgtctcatcccctctcaggatgtacttctccatgtcctgctcgatccactggtacatgaggcccttcacatgcacgtctcggatggcgtccgtcacgtccttgtagagatgtgcttggtcaaactccaggctgtggcccagaaagtagtccaccacacaggacggcagagccatctccggtagcgagaagatgtccatgaactgcttaatggagggacccttgccatagaagccactcatctggtatagtgggatgtgctgggtacccccatacagctcaatcacctcctcgtctggcacaggctggaggcccctgtaggctgtccccagacctgcccgggcaggtctgtttttttctggcagatctgatgctgatttgatgctgtatgatcttttttttttttttagttaaattcatttagtgaatgttctattattttatacatacacattaagtactcagctaagtaatggcactatgaggattttttttttntttcctgtcagcagcagttctgtgaatgcat

SEQ ID NO: 648 - DNA, 343 bp, Homo sapiens
ctgatcagcctatatgaagaaagaaaaggttatcattcagtccacgacatgtttggttgatttcaacataggttttccagttatacttttaatattgtgatctttcaaaaatcaatcttaaaatcctttgaaacctgtagcacggtcatttaatgaaagtaaatagaataaagaaaactccttatgctattttaacaaaggattacaaggaagtgacaacatctgctcacttcaagttttcttttctgggcccatggcttacagcttgctctgcgatctaactaggctaagttcatcatgtgaaaaatggcacctctagtggcagaaggccccttggcaccag

SEQ ID NO: 649 - DNA, 377 bp, Homo sapiens
ctgcagccgctgcagctactcctgctgtccgcaccgttccacagtataaatatgctgcaggagttcgcaatcctcagcaacatcttaatgcacagccacaagttacaatgcaacagcctgctgttcatgtacaaggtcaggaacctttgactgcttccatgttggcatctgcccctcctcaagagcaaaagcaaatgttgggtgaacggctgtttcctcttattcaagccatgcaccctactcttgctggtaaaatcactggcatgttgttggagattgataattcaaacttcttcatatgctcgagtctccagagtcactccgttctaaggttgatgaagctgtagctgtactacaagcccaccaagctaaagagg

SEQ ID NO: 650 - DNA, 469 bp, Homo sapiens
ccaagctgcaggggatttgggggatgtgggacctccaattcccagccccggcttcagctctttcccaggtgttgactccagctccagcttcagctccagctccaggtcgggctccagctccagccgcagcttaggcagcggaggttctgtgtcccagttgttttccaatttcaccggctccgtggatgaccgtgggacctgccagtgctctgtttccctgccagacaccacctttcccgtggacagagtggaacgcttggaattcacagctcatgttctttctcagaagtttgagaaagaactttctaaagtgagggaatatgtccaattaattagtgtgtatgaaaagaaactgttaaacctaactgtccgaattgacatcatggagaaggataccatttcttacactgaactggacttcgagctgatcaaggtagaagtgaaggagatggaaaaactggtcatacag

SEQ ID NO: 651 - DNA, 436 bp, Homo sapiens
  misc_feature 347, 436: n = A,T,C or G
aaaaaagtgacattgctttattactattggcaggtggggcctgcatgaggtggttagtgtgctcaggggatgggtgggctgtggagatgatgacagaaaggctggaaggaaagggggtgggtttgaaggccagggccaaggggtcctcaggtccgcttctgggaagggacagccttgaggaaggagtcatggcaagccatagctaggccaccaatcagattaagaaattctgagaaatctagctgaccatcactgttggtgtccagtttcttcatcatgcggtcaaggacaccagggtccttctggttctttgtgaaggcagctagttctgtattcatgaagcttangaactctgtcttggagagagtgtagttataaccatcctttccagcatacttctggaagacagcaatcagggactcgatgcaccgctcan

SEQ ID NO: 652 - DNA, 446 bp, Homo sapiens
ccagctcaatgctgacctccgcaagttggcagtcaacatggtccccttcccacgtctccatttctttatgcctggctttgcccctctcaccagccgtggaagccagcagtatcgagctctcacagtgccggaactcacccagcaggtcttcgatgccaagaacatgatggctgcctgtgacccccgccacggccgatacctcaccgtggctgctgtcttccgtggtcggatgtccatgaaggaggtcgatgagcagatgcttaacgtgcagaacaagaacagcagctactttgtggaatggatccccaacaatgtcaagacagccgtctgtgacatcccacctcgtggcctcaagatggcagtcaccttcattggcaatagcacagccatccaggagctcttcaagcgcatctcggagcagttcactgccatgttccgccggaagg

SEQ ID NO: 653 - DNA, 290 bp, Homo sapiens
ccactttgagcatctcatggtggccctagtgactccaccagcagtctttgatgcaaagcagctaaagaaatccatgaagggcgcgggaacaaacgaagatgccttgattgaaatcttaactaccaggacaagcaggcaaatgaaggatatctctcaagcctattatacagtatacaagaagagtcttggagatgacattagttccgaaacatctggtgacttccggaaagctctgttgactttggcagatggcagaagagatgaaagtctgaaagtggatgagcatctgg

SEQ ID NO: 654 - DNA, 467 bp, Homo sapiens
cacgagcacacagcacacaaacgcacagcacacacgcacacacagcacacacacgagcacacagcacacaaacgcacagcacacgcacacacatgcacacacagcacactagcacacagcacacacacaaagacacagcacacacatgcacacacagcacacacacgcgaacacagcacacacgaacatgcacacacagcacacacacataaaatgtgatacatatatatacacacacacacaaaatgtgatatatatatatgtgtatacacacacacacacacacacacacacacacacacacacacaccatggaatactactcagccataaaaaggaatgaaataatggcattcacagcaacttggatggaattgaagactattattccaagtgaagtaactcaggagtggaaagccaaacattgtatgttctcacccgtatatgggaaccaagctatgaggatg

SEQ ID NO: 655 - DNA, 286 bp, Homo sapiens
aaaacttttgttaagaaaaactgccagtttgtgcttttgaaatgtctgttttgacatcatagtctagtaaaattttgacagtgcatatgtactgttactaaaagctttatatgaaattattaatgtgaagtttttcatttataattcaaggaaggatttcctgaaaacatttcaagggatttatgtctacatatttgtgtgtgtgtgtgtatatatatgtaatatgcatacacagatgcatatgtgtatatataatgaaatttatgctgctggtattttgcatttt

SEQ ID NO: 656 - DNA, 304 bp, Homo sapiens
aaaaaagtttcctagccatgaagccctgctactgatttagacaaggtattatggtcattactttgtacccctatccttccaagcacttctggtacttcagtcgtttttactgatccaccaacacctaaagaggctatgctacagtctctagctaaatggaagacacattcatccttctccctctgactgctttgatcatcatttattgcatctcataactaattttctaaagtttggattgggacttttcaggtcctttttggagggcaaaggaagtgccagcttctctggggaacttgttttt

SEQ ID NO: 657 - DNA, 141 bp, Homo sapiens
atgatatgaaaaaccatcgttggtcgtggttgtagtccgtgcgagaataatgatgtatgctttgtttctgttgagtgtgggtttagtaatggggtttgtggggttttcttctaagccttctcctatttatgggggtttagt

SEQ ID NO: 658 - DNA, 430 bp, Homo sapiens
  misc_feature 400: n = A,T,C or G
ctgatgacccaggactgcgctctgccccatcacagccagcatgactgcttctctgagagaacttgcccatcaggggctgggacatgggggtgtgggtaaagacagggatgaaggatagaggctgagagaagaaggaagaatcagcccagcaggtatgggcatctgggaaacctccagcctcaagtgtgttggtaacatgaaaaagctctggggggtagttggatctgggtgtctggtccattgctggcagtggacattattcttgccctaagagacactgccttttcagcagcagatactggtgagatgggggtggctcaggctgttcttcctcctcctagaatgtctggagctgtttctacattcagatactggtcccctatcacaaggctactggctnataggaattccctcctggtgccaccactgg

SEQ ID NO: 659 - DNA, 507 bp, Homo sapiens
ctggatctgggattattgtttcactaccaggtttccagccagcagggcagacttctccgtgtttgtcagtgtactggaatgcttgaaccaaacgtagtgtctcatccactgatctacccacaggaagatcattcagagtaatttgtcttaggattcctttgtcatcaataatgaagagacctctaagagtgtggcctgagtcctctaggtatacaccatagtcctttgagatctgatgggtcaaatctgaaagaagtggaatccttattggcccaagtcctccttgtcttcgaggggtattaatccaggccaaatgggtaaactgtgaatcaacagagcatgctaccacttcagtatttatagatctgaattcttcaagtctgtcgccaaaagcgataatttcagttggacacacaaatgtgaaatcaagtgggtagaagaagaaaaccaagtatttcccacgataatcagttaacttcagctccttaaattctccatcgatcacag

SEQ ID NO: 660 - DNA, 447 bp, Homo sapiens
ctgccaacatgccatccagactgaggaagacccggaaacttaggggccacgtgagccacggccacggccgcataggcaagcaccggaagcaccccggcggccgcggtaatgctggtggtctgcatcaccaccggatcaacttcgacaaataccacccaggctactttgggaaagttggtatgaagcattaccacttaaagaggaaccagagcttctgcccaactgtcaaccttgacaaattgtggactttggtcagtgaacagacacgggtgaatgctgctaaaaacaagacgggggctgctcccatcattgatgtggtgcgatcgggctactacaaagttctgggaaagggaaagctcccaaagcagcctgtcatcgtgaaggccaaattcttcagcagaagagctgaggagaagattaagagtgttgggggggcctgtgtcctgg

SEQ ID NO: 661 - DNA, 471 bp, Homo sapiens
ctgatttcccgaagccactactcccccatctacctgtcgtttgtcatgcttttggctgccctgagctggcagtacctgaccactctctcccaggtaacagaagactatgttcagactggagaacactgatcccaaatttgtccatagctgaagtccaccataaagtggatttactttttttctttaaggatggatgttgtgttctctttatttttttcctactactttaatccctaaaagaacgctgtgtggctgggacctttaggaaagtgaaatgcaggtgagaagaacctaaacatgaaaggaaagggtgcctcatcccagcaacctgtccttgtgggtgatgatcactgtgctgcttgcggctcatggcagagcattcagtgccacggtttaggtgaagtcgctgcatatgtgactgtcatgagatcctacttagtatgatcctggctagaatgataattaaaagta

SEQ ID NO: 662 - DNA, 546 bp, Homo sapiens
ctgatccgggactgcaataacaatgtccagagtatgcgacggacagaggagctaatctacctgagccagaagattgagtttgagtgcaaaatattcccgctcatttctcagtcacgctggctggtgaaaagtggggagctgacagccttggagttcagtgcttccccagggctacgaaggaagctgaacacgcgtccagtccacctgcacctcttcaatgactgtctgctgctgtctcggccccgagagtcagtgactggagtggcaggccagggcacaagaggggaaggggatgaggaaagaggggggtctgaaagggagagagaagggtcatgttcctagaagagcccttctcaatggcttaacccatagagcccaggtcatagcctagagaagagaaaaacaagcccaaagcaaaaaggggatcccatcaaactgtatcatgagaccacatagcaggacatgtaatatggtatagacacagagcaaaatgtagcaaattagcttatcacattctcacatgagtctatttgtggcttctttgga

SEQ ID NO: 663 - DNA, 508 bp, Homo sapiens
gtttccgggaggcgcgtggggcttgaggccgagaacggcccttgctgccaccaacatggagactttgtaccgtgtcccgttcttagtgctcgaatgtcccaacctgaagctgaagaagccgccctggttgcacatgccgtcggccatgactgtgtatgctctggtggtggtgtcttacttcctcatcaccggaggaataatttatgatgttattgttgaacctccaagtgtcggttctatgactgatgaacatgggcatcagaggccagtagctttcttggcctacagagtaaatggacaatatattatggaaggacttgcatccagcttcctatttacaatgggaggtttaggtttcataatcctggaccgatcgaatgcaccaaatatcccaaaactcaatagattccttcttctgttcattggattcgtctgtgtcctattgagttttttcatggctagagtattcatgagaatgaaactgccgggctatctgatgggttagagt

SEQ ID NO: 664 - DNA, 409 bp, Homo sapiens
aattaacagtgcgtatttgcctgaagaaggtcagtgtgcttgcttggagatcaggacgcaaaggtcaccatcagaaaagctaagtttgctgtatagtgaggatcaggagatctgatcctgattgcagaaccttccctgattacagaatcttgggttgtatctcccacttcacccttctagaccatcccagaagatctataagatttcatctgggaaatcactaggagttcttggaagggaaagaaggaagattgttggttggaataaaaacagggttgaatgagttccagaaagcagggttctcaacctcgtggacagcaatctgcagaagaagagaacttcaaaaaaccaactagaagcaacatgcagagaagtaaaatgagaggggcctcctcaggaaagaagacag

SEQ ID NO: 665 - DNA, 452 bp, Homo sapiens
cgggaagcttgtcatcaatggaaatcccatcaccatcttccaggagcgagatccctccaaaatcaagtggggcgatgctggcgctgagtacgtcgtggagtccactggcgtcttcaccaccatggagaaggctggggctcatttgcaggggggagccaaaagggtcatcatctctgccccctctgctgatgcccccatgttcgtcatgggtgtgaaccatgagaagtatgacaacagcctcaagatcatcagcaatgcctcctgcaccaccaactgcttagcacccctggccaaagaatcagtgaatgcagcttttgaaatgacattaacagaaggaagtaagttggagaagaaactcttttattcaacctttgccactgatgaccggaaagaagggatgaccgcgtttgtggaaaagagaaaggccaacttcaaagaccagtgagaaccag

SEQ ID NO: 666 - DNA, 347 bp, Homo sapiens
aaattttggcatgcggctaccaagggcatccttgtggctatggtctgtactttcttcgacgctttcaacgtcccggtgttctggccgattctggtgatgtacttcatcatgctcttctgtatcacgatgaagaggcaaatcaagcacatgattaagtaccggtacatcccgttcacacatgggaagagaaggtacagaggcaaggaggatgccggcaaggccttcgccagctagaagcgggactgaggctgcctcacgtgttgcaagaacagttttgagccattgttaacaatgccttttttcttcacataaagtagttgattacgagggagtcaaattttcttttt

SEQ ID NO: 667 - DNA, 454 bp, Homo sapiens; identical to SEQ ID NO: 87

SEQ ID NO: 668 - DNA, 464 bp, Homo sapiens
ccacctggagacggtgattttgggcctattgaagacacctgctcagtatgacgcttctgagctaaaagcttccatgaaggggctgggaaccgacgaggactctctcattgagatcatctgctccagaaccaaccaggagctgcaggaaattaacagagtctacaaggaaatgtacaagactgatctggagaaggacattatttcggacacatctggtgacttccgcaagctgatggttgccctggcaaagggtagaagagcagaggatgactctgtcattgattatgaactgattgaccaagatgctcgggatctctatgacgctggagtgaagaggaaaggaactgatgttcccaagtggatcagcatcatgaccgagcggagcgtgccccacctccagaaagtatttgataggtacaagagttacagcccttatgacatgttggaaagcatcaggaaagagg

SEQ ID NO: 669 - DNA, 522 bp, Homo sapiens
  misc_feature 422: n = A,T,C or G
ccaggggtctctacaaatttcttagcagattcaatgctatcaaacacaacaaaaattgatcccttaaatgctttatgcaatgttcttctcatctggatatttagtacttgacctttatcttctaaccattcttttatgtcatcaagagttgcatcagttgggaagcctttaatataaacagatctgttttttacatcatttttatactcatcagtcacttcaggtaggggtttgcttggagaccttctgattttagttttatcttcactgatttccatgagttctgccttggatttgctcaatgcttccacaattacattaaagtctgttgttagacggttcaacctgttgaattttatcattatctccaaaggtacccagccttcatccagttttatctgttcctttagaaacttgtcccngtggcaaattgaagtcgccaaaataatactcaatttgatgacagattttggcctccagggcagccatcttttcattatcaccattttcagccattgcggc

SEQ ID NO: 670 - DNA, 524 bp, Homo sapiens
atcgccctgaaggactgtttttgttttgttttgtttgcttggcatagccccttcaaggaatttaatctctcggccatattcttgtctgattttacggaggttgatgtcgctactgtgttaaataaccagtactttggttttcattccgttactaagtactttaaggtcttatatgtcataattttattgctaacatcaaatatttattttattttttagaaaaataactaaacatgggcaaaggagatcctaagaagccgagaggcaaaatgtcatcatatgcattttttgtgcaaacttgtcgggaggagcataagaagaagcacccagatgcttcagtcaacttctcagagttttctaagaagtgctcagagaggtggaagaccatgtctgctaaagagaaaggaaaatttgaagatatggcaaaagcggacaaggcccgttatgaaagagaaatgaaaacctatatccctcccaaaggggagacaaaaaagaagttcaaggatcccaatgcacccaaaagg

SEQ ID NO: 671 - DNA, 189 bp, Homo sapiens
ctgcagatacctcggattgaggatggtaacaattttggagtggctgtccaggagaaggtgtttgagctgatgaccagcctccacaccaagctagaaggcttccacactcaaatctctaagtatttctctgagcgtggtgatgcagtgactaaagcagccaagcagccccatgtgggtgattatcggcag

SEQ ID NO: 672 - DNA, 446 bp, Homo sapiens
ccttccggcggaacatggcagtgaactgctccgagatgcgcttgaagagctcctggatggctgtgctattgccaatgaaggtgactgccatcttgaggccacgaggtgggatgtcacagacggctgtcttgacattgttggggatccattccacaaagtagctgctgttcttgttctgcacgttaagcatctgctcatcgacctccttcatggacatccgaccacggaagacagcagccacggtgaggtatcggccgtggcgggggtcacaggcagccatcatgttcttggcatcgaagacctgctgggtgagttccggcactgtgagagctcgatactgctggcttccacggctggtgagaggggcaaagccaggcataaagaaatggagacgtgggaaggggaccatgttgactgccaacttgcggaggtcagcattgagctgg

SEQ ID NO: 673 - DNA, 442 bp, Homo sapiens
ccacaactgtgaagttagaaaagccctgtcaaagcaagagatggctagtgcttcatccagccaaagaggtcgaagtggttctggaaactttggtggtggtcgtggaggtggtttcggtgggaatgacaacttcggtcgtggaggaaacttcagtggtcgtggtggctttggtggcagccgtggtggtggtggatatggtggcagtggggatggctataatggatttggtaatgatggaagcaattttggaggtggtggaagctacaatgattttgggaattacaacaatcagtcttcaaattttggacccatgaagggaggaaattttggaggcagaagctctggcccctatggcggtggaggccaatactttgcaaaaccacgaaaccaaggtggctatggcggttccagcagcagcagtagctatggcagtggcagaaga

SEQ ID NO: 674 - DNA, 527 bp, Homo sapiens
aaaatgatggttgtttttccgagcttcattaacaaaaaactctgctaaataaaatgcggttttcacagcattaggtgcatgggaaatgccatccaaattcttccactcataaggtgctttctctggatgccactggacaccatatactggatacttatatccttccattgttgaaataaactcaatcttgccatctgtatttgtagttaagacattgaaaaacttctttaacttttcattcattgtaaaattcttcacggagaggctccacttatggaaattggcagtcagaggttctactgctaatgacagcaacaactcagtaggaaaattctggaacattctgctgtgcaattgacctccagtgaagttcagcggcattgccacgtcaacagtatctgtggcaattaataagcactctccactaatcagcagtgaaagctcttcaaatccaaggcatgtgccccacacaggaaaatagtctccatcatcaaaactctgtatggacaagttataaaatattttgg

SEQ ID NO: 675 - DNA, 423 bp, Homo sapiens
cctacagacttatttcttcttggacacacccacggtgcggccacggcggccagtggtcttggtgtgctggcctcggacacgaaggccccagaagtgacgcagccctctatgggcccgaatcttcttcagtcgctccaggtcttcacggagcttgttgtccagaccattggctaggacctggctgtattttccatcctttacatccttctgtctgttcaagaaccagtctgggatcttgtactggcgtggattctgcataatggtgatcacacgttccacctcatcctcagtgagttctcccgccctcttggtgaggtcaatgtctgctttcctcaacaccacatgagcatatcttcggcccacacccttaatggcagtgatggcaaaggctattttccgccgcccatcgatgttggtgttgag

SEQ ID NO: 676 - DNA, 452 bp, Homo sapiens
  misc_feature 435, 452: n = A,T,C or G
ctgcacatcaaatgtacctgggatgaggtgggtggagctttgaatctaccactatccaggccacacacctagaagctctggtttcattgtttcattgatttcattgttttgattgatgctgaccttaggcagcagagttttcaatgctctccaggtgtttctaaagtgcagacaagtttaggaccgtgcttgagggtgaagggcaggactgtgatggggaggggcaaatatggggcccttggggtgcaggcaatggttttccttgacctgaatgggggtctcacaggtgttgcatatacatatacgtacacatgtcagctcttccctttctccacagcatacacgtaggtgttccacggcccacaggtgacagcctttacttggagttgcttatctacaaagtattccacacggcgaggccgatccaagctggtngtgtcctcgtggcccan

SEQ ID NO: 677 - DNA, 365 bp, Homo sapiens
aaaaaatagttcagtacatttttgttataaaattcatttacaggaggttattcacatgtacttgtcaaatttactcctgataattcacaaaaacatacaactcaacaaactgtgcacaataaatccaaggcaaattatatacaaagaaacaaaacaagcttttaagtagcacatattcatttgaaataactaatattgaaagaagacagggaactttcttttaatgccatggcaaagacgaagcgaagagccacacttcacaccttgtaaaaagaatagccctgttcaacaacgctgcgctgacagccacatcaggaggggccacggtgaacataggaaatggctttggcaaatacttgtaccaa

SEQ ID NO: 678 - DNA, 478 bp, Homo sapiens
ctgtccaatggcaacaggaccctcactctattcaatgtcacaagaaatgacacagcaagctacaaatgtgaaacccagaacccagtgagtgccaggcgcagtgattcagtcatcctgaatgtcctctatggcccggatgcccccaccatttcccctctaaacacatcttacagatcaggggaaaatctgaacctctcctgccacgcagcctctaacccacctgcacagtactcttggtttgtcaatgggactttccagcaatccacccaagagctctttatccccaacatcactgtgaataatagtggatcctacacgtgccaagcccataactcagacactggcctcaataggaccacagtcacgacgatcacagtctatgcagagccacccaaacccttcatcaccagcaacaactccaaccccgtggaggatgaggatgctgtagccttaacctgtgaacctgagattcagaaca

SEQ ID NO: 679 - DNA, 437 bp, Homo sapiens
gcccgtgccgccgccgcctcctgggaagagaggaagcgggagaggagcccacgtcgcctgtcacccaatatctccagccgcgcagtcccgaagagtgtaagatgttcgcctgcgccaagctcgcctgcaccccctctctgatccgagctggatccagagttgcatacagaccaatttctgcatcagtgttatctcgaccagaggctagtaggactggagagggctctacggtatttaatggggcccagaatggtgtgtctcagctaatccaaagggagtttcagaccagtgcaatcagcagagacattgatactgctgccaaatttattggtgcaggtgctgcaacagtaggagtggctggttctggtgctggtattggaacagtctttggcagccttatcattggttatgccagaaacccttcgctgaagcagcag

SEQ ID NO: 680 - DNA, 292 bp, Homo sapiens
ccagcagccaggagggaggtaggctgatgtgatgggatgggatcttgccctgggttggtctcatggtgcagaagagcagtgttggaatcattctaatgcttcaggatgcctcatgtgccccatggagctcagacatcaggaggtgctgggactctatttagccgttcgatgatgcggttgttgtccaggaggtcagatgccagcagcttcatcccctcgcagagctcttgcatgtggagaagcaggtcctttcgtgtagggctggggtaaggagctatgggaggcggcgagg

SEQ ID NO: 681 - DNA, 277 bp, Homo sapiens
ccttgaccgcgtacttccgcagcgggtacagccgctccttccgctgctgcttcttggtcttcaggttctcctcgtgcttgttgagccggcggcgcatggcacgtgtcttcttaggccgcaggtccaggggcttgtacttcttgcccttgtagaatttcctgaggttttctttctgagtctggttaataactgtgagaacacgggcaatggatttccggacgactcggatcttagagagcttggaggccgcaccgcctgtcactttggcgacgcgcag

SEQ ID NO: 682 - DNA, 362 bp, Homo sapiens
ccactcctgctgtatctacacctaccagtcactgaacacctgcccaagtgtgatggcttccatgcaggagacccaagtggctctgctagggagaatgacttatttacctaaggcttttttatttctcaaaagtggggggaaaaagggctggtttctagaaacagatgtggaattgaagaatgtcccagggagctaagttttaaggactaatcacaaacttgtttctccaacaacatcctgaatccattccttgcaccatcacacatttttcatgcatcagaagtgtttctagagctccagaaccacgagtacctcatcacgtcctgagcgctcacatcccccagcaagccgcctgcaccagg

SEQ ID NO: 683 - DNA, 435 bp, Homo sapiens
atcagttgccaagagcaacatacataccgacctggctgaattattgccagtgaaaacaacctgtacgaagcctttgctcaggttctaaaatatgtttgtccttgcacgaattttgtatatttcaaatatttctgtaaaggtttcttcttttctgttagagtgtggtgttaagccagagtcagtggtttgtgttctcattaaaatgtttgtttaaatcctatgtccaattcaagcctatctaactacatttggtaggattaacatttcatataacaaatggggcttaattaaaaactttaacttggaataaaggaacagggatcactttatcttctgccttcatttaccttagtccaagattcttgcaaaacaggcaactgaacaaacattaggtttatgtaggtaaaatgtgaaagcatttctcctccacttttt

SEQ ID NO: 684 - DNA, 387 bp, Homo sapiens
attggattgccacacggctcacattgcatgcaagtttgctgagctgaaggaaaagattgatcgccgttctggaaaaaagctggaagatggccctaaattcttgaagtctggtgatgctgccattgttgatatggttcctggcaagcccatgtgtgttgagagcttctcagactatccacctttgggtcgctttgctgttcgtgatatgagacagacagttgcggtgggtgtcatcaaagcagtggacaagaaggctgctggagctggcaaggtcaccaagtctgcccagaaagctcagaaggctaaatgaatattatccctaatacctgccaccccactcttaatcagtggtggaagaacggtctcagaactgtttgtttcaattgg

SEQ ID NO: 685 - DNA, 308 bp, Homo sapiens
cctcagttagtgagtcaagctgtgatgtgtgtgtctgaacacaactggctcccttggtataccgggggctccctctccagatgggtgtgagtgcatggtcctactgtacacacaggtctcagtatctatatgtgtctcatttgttcccatgggtctctgtgtttggatacataagcatggatatccctgctcatacagcaggaactcaggatctgcatggtgtatgtccctgtctgtaaacatgggctccagcaagtggatatgtgcgggcctgcccgctcctgtccatccgcaggtcttccttcagg

SEQ ID NO: 686 - DNA, 500 bp, Homo sapiens
gtatttatttgtcttttctctgtcaaaccctgagccaaccacgttccccaggctgcctggggaggtataggaaaaggaacacacggggccaaccagacgcgggagaactatgggaggtggagacggctccttcacatggcaaagaggatgagaaaggctaccatcagacaaaagagccccatggcctccgagagggcaaagcccagaatggcgtaggagaagagctgttgcttcagagaagggttcctggcatagccaatgatgaggctcccaaacacagttccaatcccagccccagaaccagccaccccaactgtggcagccccagctccaatgaacttggctgctgtgtcgatgtcccttgaaatggcgctggtttggaagctgcggctagagacaagtgaggtaaggggacatgagactgccaagctgctgaggctctcatctgtcagtatctccggtcgtttcagcaccactgcagatagcggacggctcagcag

SEQ ID NO: 687 - DNA, 558 bp, Homo sapiens
  misc_feature 555: n = A,T,C or G
ctctactaaaaatacaaaaatgagctgggcttggtggcgcgcacctgtagtcccagttactcgggaggctgaggcaggagaatcgcttgaacccgggaggtggagattgcagtgagcccagatcgcaccactgcactccagtctggcaacagagcaagactccatctcaaaaagaaaagaaaagaagactctgacctgtactcttgaatacaagtttctgataccactgcactgtctgagaatttccaaaactttaatgaactaactgacagcttcatgaaactgtccaccaagatcaagcagagaaaataattaatttcatgggactaaatgaactaatgaggataatattttcataattttttatttgaaattttgctgattctttaaatgtcttgtttcccagatttcaggaaactttttttcttttaagctatccacagcttacagcaatttgataaaatatacttttgtgaacaaaaattgagacatttacattttctccctatgtggtcgctccagacttgggaaactattcatgaatatttatattgnatg

SEQ ID NO: 688 - DNA, 493 bp, Homo sapiens
aaaaaaaggcccccagggcaagttatttacagtttaattgccactgtcaactgatctggaccttgatcgggaccgggacctctggcgatccacagatgctggagacttagatctacttgaagaaccacgtttctggctcttctcaggcacgggagacctactaacagaacgggacttgctccggctccggctcctgctcctgcttcttgaccggctgtaagatttgcgactacgggaacgggatcggctacgagacctagaggaacttctggtccgggatcgagacctgcttcttgacctactgtgccttttgctgccttcaattaattttatttttctcccatttatttcctttccagaaagtttttcaatagcattctttaagtcaccataagaggcaaactcaaccaccccttcatttaatttaggtcggtgtgcatccgcaaacgttacttccccagcttgtctcatgaaatctttgagatcctgccag

SEQ ID NO: 689 - DNA, 439 bp, Homo sapiens
aaacgcaaagattaccttaagcaacacatgaaaactcatgccccagaaagggatgtatgtcgctgtccaagagaaggctgtggaagaacctatacaactgtgtttaatctccaaagccatatcctctccttccatgaggaaagccacccttttgtgtgtgaacatgctggctgtggcaaaacatttgcaatgaaacaaagtctcactaggcatgctgttgtacatgatcctgacaagaagaaaatgaagctcaaagtcaaaaaatctcgtgaaaaacggagtttggcctctcatctcagtggatatatccctcccaaaaggaaacaagggcaaggcttatctttgtgtcaaaacggagagtcacccaactgtgtggaagacaagatgctctcgacagttgcagtacttacccttggctaagaactgcactgctttgttt

SEQ ID NO: 690 - DNA, 465 bp, Homo sapiens
aaactggattgaattgctttgtcttagatgaggctgagaaggttgtttctgaacagaaagtaatgatgacgtccctcttttttgtagtatgtccgtggttcagaccctgtattaaagcttttggacgacaatgggaacattgctgaagaactgagcattctcaaatggaacacagacagtgtagaagaattcctgagtgaaaagttggaacgcatataaatcttgcttaaattttgtcctatccttttgttaccttatcaaatgaaatattacagcacctagaaaataatttagttttgcttgcttccattgatcagtcttttacttgaggcattaaatatctaattaaatcgtgaaatggcagtatagtccatgatatctaaggagttgacaagcttaacaaaacccattttttataaatgtccatcctcctgcatttgttgataccactaacaaaatgctttg

SEQ ID NO: 691 - DNA, 550 bp, Homo sapiens
ccacggggactgttattcgcaagctggttttctagacctgttagttggaagcatggtgagcaccatttctggacgctcaggccgtgtcgggcttcagtcatctccaccacacaggtacagcagcgctttctggtagtcgcccttagtgtcttgctggatataatagtacagggacttgccgtactttctcttgaattcagacctaattttcaacatgtccacttcactgcgggagaccatgattctgatcaggaccttatctcgcgtccccttgcccttcatggagtcatacagccgatcagcaaaatacaggggcttgttctgaatgcactgaaccaggttcaggaaagcattttccaggtctcctttaacctctttcctgatgctttccaacatgtcataagggctgtaactcttgtacctatcaaatactttctggaggtggggcacgctccgctcggtcatgatgctgatccacttgggaacatcagttcctttcctcttcactccagtgtcatagagatcccgagcatcttggtcaatcagttca

SEQ ID NO: 692 - DNA, 370 bp, Homo sapiens
  misc_feature 3, 14, 51, 108, 330, 339: n = A,T,C or G
canatgtcctaggncctcccaattcttagacatttaatacccatttttctnctccttttattcggaccttgtatcttccatttagcttctcaaatcatccaaaaccgnatccaggccatcaccaatcattctatacgacaaatgtttcttctaacatccccatgatatcaccccttaccacaagacctcccttcagcttaatctctcccactctaggctcccacgccgcccctaatcccgcttgaagcagccctgagaaacatcgcccattatctctccataccaccccccaaaaattttcgctgccccaacacttcaacactattttgntttatttgncttattaatataagaaggcaggaatgtcagg

SEQ ID NO: 693 - DNA, 520 bp, Homo sapiens
aaaacctgaattgttaccgcatcattttccttttcataaaaatagatatatctgttcagaatttctataaaaagctgcacttgtagagaggggtccatgcactgatttgctatttttagagctttttttaggcactccattaccctcttgcctccgtgaagctcctccccatttttgtccgtgtttctgccagaccagaagagatgtgcacaggtgctcacagctcggccctgatcaggtttctttagaagtttggatgcagcaagggcacactgagtcctcagaggttcatgattctcttcactgaagcacttcatcctttcaaaagtgccaatgatcaaggtgatggcagctagctgtgctttggaatcgctgatttcatcttcatacagagaaaatgcctgggacatgaattcatatgcgactgtctcatgattttcaaaaccaatttccccagcagctagtgctccttgaagaaaaagtcttaagggcaattctgccagctctgctttgatcaaag

SEQ ID NO: 694 - DNA, 342 bp, Homo sapiens
ctgcattgagttagcgggggcggagtggtcctggggcagcctgtccctaacagaatccacctccgagttgtgacaattaaatgaaaaggttgaaaaggtgaacatgaagcacctgctacactgccctgttgccaccagcattgtcactgctctagctcctgtggcactgcacggacacgtggttgctacaagttagtacgcatatttggccttattagaggcactttcctattgtaactgaagggatagttggcttaagtcaattgaaataccagcaacaggacattccagcttcaatggcttgtgcctgtagttgtcaacctgcgccaagaactgaggcag

SEQ ID NO: 695 - DNA, 503 bp, Homo sapiens
aaattgttaggaggcttggagctattagttaatctatcttccaatacactgtttaatatagcactgaataaatgatgcaagttgtcaatggatgagtgatcaactaatagctctgctagtaattgatttatttttcttcaataaagttgcataaaccaatgagttagctgcctggattaatcagtatgggaaacaatcttttgtaaatgcaaagctgttttttgtatatactgttgggatttgcttcattgtttgacatcaaatgatgatgtaaagttcgaaagagtgaatattttgccatgttcagttaaagtgcacagtctgttacaggttgacacattgcttgacctgatttatgcagaattaataagctatttggatagtgtagctttaatgtgctgcacatgatactggcagccctagagttcatagatggacttttgggacccagcagttttgaaatgtgtttatggagtttaagaaatttattttccaggtgcagc

SEQ ID NO: 696 - DNA, 325 bp, Homo sapiens
ccagataaggctgacttcagtgctgatgcaagttcctttttggtccttctctggtaggcgaaggcaatatcctgtctctgtgcattgctgcggttggtcaaaatgttgacaatggtgacctcatccacacctttggtcttgatggctgtttcaatgttcaaagcatcccgctcagcatcaaagttagtataggctttgacagacccatatgcacttgggggtgtagagtgatcaccctccaagctgagcttgcacaggatttcgtgaacagtagacattttgaaggaagctgggccgtgcgccgagagctgagagcgtccccaaa

SEQ ID NO: 697 - DNA, 500 bp, Homo sapiens
  misc_feature 422: n = A,T,C or G
ccaccatctatgcaaagtgaaagctctgaacaagggtgatgccaactctgaagtcactgtgtactaccagtcaggtaccaggagtctaagagaatatacgcttatggagctgcttgtgatgcacatggaagaaccttgttttgacttccttcgaaccaagcagacccttgggtaccatgtctaccctacctgtaggaacacatccgggattctaggattttctgtcactgtggggactcaggcaaccaaatacaattctgaagttgttgataagaagatagaagagtttctttctagctttgaggagaagattgagaacctcactgaagaggcattcaacacccaggtcacagctctcatcaagctgaaggagtatgaggatacccaccttggggaggaggtggataggaactggaatgaangtggttacacagcagtacctctttgaccgccttgcccacgagattgaagcactgaagtcattctcaaaatcagacctg

SEQ ID NO: 698 - DNA, 117 bp, Homo sapiens
ccagataccgcccacgtgcccccatcattgctgtgacccggaatccccagacagctcgtcaggcccacctgtaccgtggcatcttccctgtgctgtgcaaggacccagtccaggagg

SEQ ID NO: 699 - DNA, 268 bp, Homo sapiens
ctggggttataagtttatagttgggaacttccttacagagtttatcataggtagctttgtcaaacaagactaagttattgagcttgtcccgaactttgcctttggaccacttcttctttttggccttgcccccggatttgttcactgggtctttgtctttcttggccgactttccagcgtccttcttcttcttgtcgtccttaggcggcattgcgaagctcggagaatagcagcagacaccgcagcctcgtcaagatgtcggacaaaa

SEQ ID NO: 700 - DNA, 205 bp, Homo sapiens
tttttgcactttttttataagcaaaaacgtgccgtttaaaccactggatctatctaaatgccgatttgagttcgcgacactatgtactgcgtttttcattcttgtatttgactatttaatcctttctacttgtcgctaaatataattgttttagtcttatggcatgatgatagcatatgtgttcaggtttatagctgttgtgttt

SEQ ID NO: 701 - DNA, 268 bp, Homo sapiens
ctggtagctggtgttgcattcaagaagactttctcttacgctgggtttgaaatgcaacccaaaaagtaccacaatcccaagattgcccttttgaatgtcgagctcgagttgaaagctgagaaagacaatgctgagataagagtccacacagttgaggattatcaggcaattgttgatgctgagtggaacattctctatgacaagttagagaagatccatcattctggagccaaagttgtcttgtccaaactccccattggggatgtgg

SEQ ID NO: 702 - DNA, 544 bp, Homo sapiens
  misc_feature 523: n = A,T,C or G
cacggatctttccaagaaggcaggcgagatctggaagggaatgtccaaagagaagaaagaggagtgggatcgcaaggctgaggatgccaggagggactatgaaaaagccatgaaagaatatgaagggggccgaggcgagtcttctaagagggacaagtcaaagaagaagaagaaagtaaaggtaaagatggaaaagaaatccacgccctctaggggctcatcatccaagtcgtcctcaaggcagctaagcgagagcttcaagagcaaagagtttgtgtctagtgatgagagctcttcgggagagaacaagagcaaaaagaagaggaggaggagcgaggactctgaagaagaagaactagccagtactccccccagctcagaggactcagcgtcaggatccgatgagtagaaacggaggaaggttctctttgcgcttgccttctcacaccccccgactccccacccatattttggtaccagtttctcctcatgaaatgcagtccctggattctgtgccatctgnacatgctctcctgttggtgtg

SEQ ID NO: 703 - DNA, 401 bp, Homo sapiens
ttttttttttttagttgctgttcataagtttattatctatatctgaaaaaatcatagaaaattgctgggtttagctctcagcagcccgctcctgagctctgaggaagcttgccttcttttgagctacccgatccttcttctgagcaagggacattttgggacggttccacctcttctttttaacttctttcttgggcttcttttcatagactggattctctcgtatagcagcatgagctttcttatacatctcctccatcatgtctggagttacgctgttctttatgtattgagagaactgtttcttgtaagcatcttcatcttcttccattaagtagcgcatgtaatctgcaacattctggcccatgatgtgcttccgatgtacttctgcattaaattcc

SEQ ID NO: 704 - DNA, 221 bp, Homo sapiens
aaaagacaaaaacaaaacaaaaataccacagctcaagataaagagtcctatacagaaatcacaaaaaggacagaccatctaaggaaaaattaaaaagacgacacaaggacaggctgggcagcctgggtcagggctcctggctggtgacctgctttgagtaggtttcttgcaggtacttcttaaaagctgtggggtttttccagagctcggcagcatgtgtg

SEQ ID NO: 705 - DNA, 568 bp, Homo sapiens
ccaggctggtcttgaactcctgacgtcaagtgatctgcctgccttggtctcccaatacaggcatgaaccactgcacccacctacttagatatttcatgtgctatagacattagagagatttttcatttttccatgacatttttcctctctgcaaatggcttagctacttgtgtttttcccttttggggcaagacagactcattaaatattctgtacattttttctttatcaaggagatatatcagtgttgtctcatagaactgcctggattccatttatgttttttctgattccatcctgtgtccccttcatccttgactcctttggtatttcactgaatttcaaacatttgtcagagaagaaaaaagtgaggactcaggaaaaataaataaataaaagaacagccttttcccttagtattaacagaaatgtttctgtgtcattaaccatctttaatcaatgtgacatgttgctctttggctgaaattcttcaacttggaaatgacacagacccacagaaggtgttcaaacacaacctactctgcaaaccttggtaaaggaaccagtc

SEQ ID NO: 706 - DNA, 313 bp, Homo sapiens
  misc_feature 153: n = A,T,C or G
cctcctggtcactctgtccctgcactccatgtatagtcctcttgggttgggggtgggggggtgccgttggtgggagagacaaaaagagggagagtgtgctttttgtacagtaataaaaaataagtattgggaagcaggcttttttcccttcanggcctctgctttcctcccgtccagatccttgcagggagcttggaaccttagtgcacctacttcagttcagaacacttagcaccccactgactccactgacaattgactaaaagatgcaggtgctcgtatctcgacattcattcccacccccctcttattt

SEQ ID NO: 707 - DNA, 410 bp, Homo sapiens
ccagcgagcacatgaagcggttcttcgtgaactttgtggttgggcaggatccgggctcagacgtcgccttccacttcaatccgcggtttgacggctgggacaaggtggtcttcaacacgttgcagggcgggaagtggggcagcgaggagaggaagaggagcatgcccttcaaaaagggtgccgcctttgagctggtcttcatagtcctggctgagcactacaaggtggtggtaaatggaaatcccttctatgagtatgggcaccggcttcccctacagatggtcacccacctgcaagtggatggggatctgcaacttcaatcaatcaacttcatcggaggccagcccctccggccccagggacccccgatgatgccaccttaccctggtcccggacattgccatcaacag

SEQ ID NO: 708 - DNA, 474 bp, Homo sapiens
ctgctgcccgtgctggtgccattgccccatgtgaagtcactgtgccagcccagaacactggtctcgggcccgagaagacctcctttttccaggctttaggtatcaccactaaaatctccaggggcaccattgaaatcctgagtgatgtgcagctgatcaagactggagacaaagtgggagccagcgaagccacgctgctgaacatgctcaacatctcccccttctcctttgggctggtcatccagcaggtgttcgacaatggcagcatctacaaccctgaagtgcttgatatcacagaggaaactctgcattctcgcttcctggagggtgtccgcaatgttgccagtgtctgtctgcagattggctacccaactgttgcatcagtaccccattctatcatcaacgggtacaaacgagtcctggccttgtctgtggagacggattacaccttcccacttgctgaaaaggtcaagg

SEQ ID NO: 709 - DNA, 442 bp, Homo sapiens
ccaacctcaggcaacgggtggagcagtttgccagggccttccccatgcctggttttgatgagcattgaaggcacctgggaaatgaggcccacagactcaaagttactctccttccccctacctgggccagtgaaatagaaagcctttctattttttggtgcgggagggaagacctctcacttagggcaagagccaggtatagtctcccttcccagaatttgtaactgagaagatcttttctttttcctttttttggtaacaagacttagaaggagggcccaggcactttctgtttgaacccctgtcatgatcacagtgtcagagacgcgtcctctttcttggggaagttgaggagtgcccttcagagccagtagcaggcaggggtgggtaggcaccctccttcctgtttttatctaataaaatgctaacctgcaaaaaaaaa

SEQ ID NO: 710 - DNA, 535 bp, Homo sapiens
  misc_feature 486: n = A,T,C or G
cgctcccccctccccccgagcgccgctccggctgcaccgcgctcgctccgagtttcaggctcgtgctaagctagcgccgtcgtcgtctcccttcagtcgccatcatgattatctaccgggacctcatcagccacgatgagatgttctccgacatctacaagatccgggagatcgcggacgggttgtgcctggaggtggaggggaagatggtcagtaggacagaaggtaacattgatgactcgctcattggtggaaatgcctccgctgaaggccccgagggcgaaggtaccgaaagcacagtaatcactggtgtcgatattgtcatgaaccatcacctgcaggaaacaagtttcacaaaagaagcctacaagaagtacatcaaagattacatgaaatcaatcaaagggaaacttgaagaacagagaccagaaagagtaaaaccttttatgacaggggctgcagaacaaatcaagcacatccttgctnatttcaaaaactaccagttctttattggtgaaacatgaatccagatggc

SEQ ID NO: 711 - DNA, 332 bp, Homo sapiens
cctggatgtggctcttcgcactgaaggccaagtagtagatcacaaggccgatcgccgcagccagcacctcagtggacacccagggcccgttccaagtgccccgatggtccacgctgactgtaaacagaggcgggatgatggaaatgtcctcgttattcctctgagccttcctgaggaggctgtaggactcctcgtcgaagaatctaacctcgtaggtgcctgcgtgggcgctcttgtggtccaggctccaggacacctgataacgccccgcatcctggcctcgagtgacagggaattgttttccaccgacgtcagcatagagagccatgttc

SEQ ID NO: 712 - DNA, 481 bp, Homo sapiens
ctgaagaaaaaagcagtcatcgattttaagtccaatgggcacatttatgacaatcggatagttctgaatggcatcgacctcaaagcatttcttgatagtctaccagatgtgaaaattgtcaagatgaagtgtcctgatggaggagacaatgcagatagcagtaacacagctcttaatatgcctgttattcctatgaatactattgcagaagcagttattgaaatgattaaccgaggacagattcaaataacaattaatggattcagtattagcaatggactggcaactactcagatcaacaataaggctgcaactggagaggaggttccccgtaccattattgtaaccacccgttctcagtacgggttaccagaagatgccatcgtatactgtaactttaatcagttgtataaaattgacccttctactttgcagatgtgggcaaacattctgaagcgtgttcccaatagtgtactctggc

SEQ ID NO: 713 - DNA, 129 bp, Homo sapiens
caacagcgagcaccttcctgctccgtgactgttcttggcccctctagcagtcctcagatctttagatcggccctcgcagggtcagcagaacaggcagccgtgaaggtgaggggcatggaggaatctgtt

SEQ ID NO: 714 - DNA, 471 bp, Homo sapiens
ctgacattcctgccttcttatattaataagacaaataaaacaaaatagtgttgaagtgttggggcagcgaaaatttttggggggtggtatggagagataatgggcgatgtttctcagggctgcttcaagcgggattaggggcggcgtgggagcctagagtgggagagattaagctgaagggaggtcttgtggtaaggggtgatatcatggggatgttagaagaaacatttgtcgtatagaatgattggtgatggcctggatacggttttggatgatttgagaagctaaatggaagatgcaaggtccgaataaaaggaggagaaaaatgggtattaaatgtctaagaattgggaggacctaggacatttgattagagagtgcctaaggagattcagcatagtcctgccagcaaagattatttacttcaagagttaagagtggcagtttggggatagcaccaggagatatcag

SEQ ID NO: 715 - DNA, 454 bp, Homo sapiens
ctggcttcactgctcaggtgattatcctgaaccatccaggccaaataagcgccggctatgcccctgtattggattgccacacggctcacattgcatgcaagtttgctgagctgaaggaaaagattgatcgccgttctggtaaaaagctggaagatggccctaaattcttgaagtctggtgatgctgccattgttgatatggttcctggcaagcccatgtgtgttgagagcttctcagactatccacctttgggtcgctttgctgttcgtgatatgagacagacagttgcggtgggcgtcatcaaagcagtggacaagaaggctgctggagctggcaaggtcaccaagtctgcccagaaagctcagaaggctaaatgaatattatccctaatacctgccaccccactcttaatcagtggtggaagaacggtctcagaactgtttgtttcaattgg

SEQ ID NO: 716 - DNA, 300 bp, Homo sapiens
caggtcctgggctcgcctggaccacaagtttgacctgatgtatgccaagcgtgcctttgttcactggtacgtgggtgaggggatggaggaaggcgagttttcagaggcccgtgaggacatggctgcccttgagaaggattatgaggaggttggagcagatagtgctgacggagaggatgagggtgaagagtattaacctgtgtgctgtacttttacactcctttgtcttggaactgtcttatttttgttctgtaaatgtctattgccgtaaattgttaataaaattgatgtttccatttt

SEQ ID NO: 717 - DNA, 575 bp, Homo sapiens
aaaatcatatccagcacaaaaactatttctggctgaatagcacagaaaagtattttaacctacctgtagagatcctcgtcatggaaaggtgccaaactgttttgaatggaaggacaagtaagagtgaggccacagttcccaccacacgagggcttttgtattgttctactttttcagccctttactttctggctgaagcatccccttggagtgccatgtataagttgggctattagagttcatggaacatagaacaaccatgaatgagtggtatgatccgtgcttaatgatcaagtgttacttatctaataatcctctagaaagaaccctgttagatcttggtttgtgataaaaatataaagacagaagacatgaggaaaaacaaaaggtttgaggaaatcaggcatatgactttatacttaacatcagatcttttctataatatcctactactttggttttcctagctccataccacacacctaaacctgtattatgaattacatattacaaagtcataaatgtgccatatggatatacagtacattctagttgggaatcgtttactctgctag

SEQ ID NO: 718 - DNA, 483 bp, Homo sapiens
ctgcctataaaactagacttctgacgctgggctccagcttcattctcacaggtcatcatcctcatccgggagagcagttgtctgagcaacctctaagtcgtgctcatactgtgctgccaaagctgggtccatgacaacttctggtggggcgagagcaggcatggcaacaaattccaagttagggtctccaatgagcttcctagcaagccagaggaagggcttttcaaagttgtagttacttttggcagaaatgtcgtagtactgaagattcttctttcggtggaagacaatggatttcgccttcactttcctgtccttaatatccactttgttgccacacaacacaatggggatgttttcacacactcgtaccagatctctatgccagttaggcacattcttgtaagtaactctcgatgttacatcaaacattatgatggcacactgggcttggatataatagccatctctcagtccaccgaa

SEQ ID NO: 719 - DNA, 338 bp, Homo sapiens
aaaaaaactggcttggaaaaaaatcacaaaaaatttaagtgacaacaaatcttgattaactagtccatcttcctaccacacatgattatactctaatgtagatattctggttgaatttcttccaaccaagtttgaagggccccagtagaaaatcaagtgttaatactttcagatttttattgtccaaaactgttgacaaagaaaagctaacttcaacataacttgtttctggctatacaaagacctatttcaggtgctacagatactgaaaataggagtattttacttatttctcaagagacagacttatgccatctaagaaaatgaattcagttttt

SEQ ID NO: 720 - DNA, 485 bp, Homo sapiens
  misc_feature 474: n = A,T,C or G
aaaatgcactgggagggaaaaaacgaaattaacaatctactattccctaatatatatggcttggcacccagagaaagcctctacccccgaaagagactttctacatagggttaagcttcattaaatgaggtgcaacctttcattttcagggcatctcttttcttgcaaggtctttagaggcagaagttccacttggattctaatacacatctctgtgagctcagtttcctgaaaatatacacctactgggttctaggttctcccttaccagtgactgtattcattatttcacagccaccagaatcggacatacactattaacatgatgaaaaatacagctactgctgcaagtttggcataagtggaacgcatgttcaagtacttcgcatcctggcggtatttcttggacagactggacaaattgttagcctttgaatccaatgctgagagtgcttctcctcgttgtaacacttnttcaatattgg

SEQ ID NO: 721 - DNA, 442 bp, Homo sapiens
aaaacaagcaaattttattaaaggaaaattttgcaggtttaaggtttgcaggtgaaattttgtaggtgaaaaggtttacttttcaccagtctgttctggcatgcttctaatgatgtcagagtcacctggatcaatgatagccagtgtgcacactctgtagtattttccgcatgctgtgcccagttcaatattattgccactgtagtgatggacaccagttttagccaacatagcatagtactctatttcagatttcctcaaagctgggcagttgttagcgagaatgaccaatttcgctttgccttgtctgatcatcttcagagtctgcttgtaccccaggacgtacttcccacttttcataacgagttggagcctagagttgatcgactccagcgactttttcgtcttctttgcggccaccatcttcctgccttaggagcgg

SEQ ID NO: 722 - DNA, 256 bp, Homo sapiens
ggccgatacctcaccgtggctgctgtcttccgtggtcggatgtccatgaaggaggtcgatgagcagatgcttaacgtgcagaacaagaacagcagctactttgtggaatggatccccaacaatgtcaagacagccgtctgtgacatcccacctcgtggcctcaagatggcagtcaccttcattggcaatagcacagccatccaggagctcttcaagcgcatctcggagcagttcactgccatgttccgccggaagg

SEQ ID NO: 723 - DNA, 224 bp, Homo sapiens
ctgaagccgtggatacagaaatctctgcaggcaagttgctccagagcatattgcaggacaagcctgtaacgaatagttaaattcacggcatctggattcctaatccttttccgaaatggcaggtgtgagtgcctgtataaaatattctatgtttaccttcaacttcttgttctggctatgtggtatcttgatcctagcattagcaatatgggtacgagtaagca

SEQ ID NO: 724 - DNA, 260 bp, Homo sapiens
aaaaattatcatcaagacattttacaccacaagtcacataaaattaggtctacttcagccagataacctatagctgttaaagaattatattatcctgttcataagatgagaggtagtgacattttattctctcaatgctgagctaaaaattccacacatctggcacatgggttacaagggggaaaagcacagaagcaccattgcccactcctcaggttttggtatttcaagtcacccataacttcatttgctattggcag

SEQ ID NO: 725 - DNA, 196 bp, Homo sapiens
aaaaaacaaacaggttgaaaaatgggttaaagtaggcaaatacaacatatctgcctttagagctatcaactcaggaattctctcaattatgaaatcttgcagagaagttatttttctttctcaaaatccaggtgatgacaatattccttactccagatctggcattttttcatcatcactgtcttgtgaatcatca

SEQ ID NO: 726 - DNA, 479 bp, Homo sapiens
gacggcttgagggctgtcaaaaatgctattgatgatggctgtgtggttccaggtgctggtgccgtggaagtggcaatggcagaagccctgattaaacataagcccagtgtaaagggcagggcacagcttggagtccaagcatttgctgatgcattgctcattattcccaaggttcttgctcagaactctggttttgaccttcaggaaacattagttaaaattcaagcagaacattcagaatcaggtcagcttgtgggtgtggacctgaacacaggtgagccaatggtggcagcagaagtaggcgtatgggataactattgtgtaaagaaacagcttcttcactcctgcactgtgattgccaccaacattctcttggttgatgagatcatgcgagctggaatgtcttctctgaaaggttgaattgaagcttcctctgtatctgaatcttgaagactgcaaagtgatcctgaggattacag

SEQ ID NO: 727 - DNA, 379 bp, Homo sapiens
aaaattaatcttgcttcattgttacatgtaatatatttcagacattttcactggaagatttatgaacagaaatattggttgaaagttagagattttacaaaatgctgacaaaaatattttcctagcatcagtagatttctggcatatgtttctgctagctatatatttaggaaattcaaagcataaaactttggcaacatcttggctgttctagacacagtgtacttgtcaacccctctcaggtaccttttcttgggatgcttattagaagccaagtaaagtgcttaaggtttgttttcattaaattagctatttctgctcccctgttcaaagatgcattttgagtgtttatagatcactgccctttttgaaatcacct

SEQ ID NO: 728 - DNA, 425 bp, Homo sapiens
aaatttctgaacttcttcaatacaaattaaaatagtactggagtcttttgggaggccaatagctagcagctacattaattggtgtagaggagcctccttatcgataaccaggtccaggttgggtatagccctgaccaaagggaggacggttacgcgcataaggattaggcccacttggaggaggggtcatggtacttccaggaagtgaagtaaaacctggtcttggttgataggccccaggttggcttggagccattccaggttgagaggcaggagccacagtataattagtaggctgagaagtttgggcagtgtaagtttgtgcaggataattgctcgcctggtactgctgtggcggctgagcaggcagttgttgaggctgaccagaaaaggcaggagctggtgcctgggaagttggttgctgg

SEQ ID NO: 729 - DNA, 442 bp, Homo sapiens
  misc_feature 431: n = A,T,C or G
caactggatggaagactcggacgtggaagatctgactaaagagaccctgcacaagcagtaccacctggtaaaatcgcacaccaacaccagccacgtcatgcagtatggaaacaaaacaatctccaccatgaaagtgatgcagtttcagggtatgaagcgcaaagccagttctcccgtccccctacctccagtcacacaccttgacctcacccccagccctgatgtgcctctcaccatcatgaaaaggaaactgatgaacaccaatgatctggaggagtccaggcagctcacggaggagatccagcggcatctggatgccaggcacctcattgagaagtcagtgcgtaagatcgtctccttgctggcagcgtccgaggctgaggtggagcagctcctgtccgagagagccccgctcacggggcacagttttntacaagctttt

SEQ ID NO: 730 - DNA, 505 bp, Homo sapiens
  misc_feature 450: n = A,T,C or G
ctgggctgatgaaacggatgacctggaaggagatgtttcgaccacttggcacagtaacgatgacgatgtgtatagggcgcctccaattgaccgttccatccttcccactgctccacgggctgctcgggaacccaatatcgaccggagccgtcttcccaaatcgccaccctacactgcttttctaggaaacctaccctatgatgttacagaagagtcaattaaggaattctttcgaggattaaatatcagtgcagtgcgtttaccacgtgaacccagcaatccagagaggttgaaaggttttggttatgctgaatttgaggacctggattccctgctcagtgccctgagtctcaatgaagagtctctaggtaacaggagaattcgagtggacgttgctgatcaagcacaggataaagacagggatgatcgttcttttggccgtgatagaantcgggattctggcaaaacagatacagactggagggctcgtcctgctacagacagc

SEQ ID NO: 731 - DNA, 463 bp, Homo sapiens
  misc_feature 347: n = A,T,C or G
cctggggcttctgtcgctcaggagttcaggggtggacgcagaaatgggggaaggagagtggctacgtagagagtgagagcgagattcctaaaaagatgcacagagagaccctcagagaggccaagaaagatggtgagagggtagggaaggagagggagggagagagagagagagaagcagagggaatgggttgcactggctgaggatggtggaggagccgtctcactcccttcctaatgtctatagatcaataacgagggaagaaaggaggacagggagctgatggaaacacagcttgccaactgccaagggaagaaggtagggctggactccctgctgtggcccancccttgttaggggttggtctctcactgcagccagacaggatgatcctgggttctggggaggggtaagctgccccttgccgagttctgcaccgaataaagagtccaaacccgctgct

SEQ ID NO: 732 - DNA, 459 bp, Homo sapiens
ctgacatggatgtggggcagataggctttcacaggcagaaggatgtaaaaattgtgacagtggagaagaaagtaaatgagatcctgaaccgattagaaaagaccaaagtcgagcggttcccagacctagcagcagagaaagaatgcagagatcgtgaagagaggaatgagaaaaaagcccaaattcaggaaatgaaaaagagagaaaaagaagaaatgaagaagaagagggaaatggatgaacttaggagctattcatcactaatgaaagttgaaaatatgtcttcaaatcaggatggcaatgattcagatgaattcatgtaaaaggagaaaaggagaaaaggacctttgaaagatgtgaatgtagagacaattgcagaccttttggtttcatctgtgttctgaagcataaaatacaaccaaaattctaccttcatcctacccagaaattattgatttt

SEQ ID NO: 733 - DNA, 302 bp, Homo sapiens
cctttacttattcagtgaaagtgtctatttagactaagaggtattttagtttcctgactcgggcatgttgagtaaagctaatttgccagtcctgggtgggggcaaatcctcgagcttgatgtgtagggaagggagggggcctgaataatccctgaggagtagtagaatagcagatggaacactgagaagttatttccttgaggatagatttccacgatggaaaggaaatgagaggttctgagaggcgggctagtggcttgtactatagcataacctgccgttgctggtgtgtggcgattagg

SEQ ID NO: 734 - DNA, 343 bp, Homo sapiens
ccatgaaaggacaagtatggagatgaaagctatcacactgagaatagtgggatgtagatagaaagcacctgaattgtgcttctgaattaaccaatccaggaactgctttacctttggactttttgttatgtgagatattctttatattgttccatttgctttgggtatatgtatattgttacttgtagccaaaaagaaacctctcttagtagaaacaaagggagagttaggttattcaaaaattagtatgggacaattgaatatgcctttttctgcgggagtaggtggggagaaacttaaaggttcacttgtaaaacaataaagtactaaagaaaaaaaaaaa

SEQ ID NO: 735 - DNA, 527 bp, Homo sapiens
gacagggggagggagagcatctggacaaatacctaatgtatgaggggcaaaactttttgtattattgtttgttttgtgttcagttcaaagtcttaaccagttttattgtcaaataaactataaatgttatgggggagatcttataaatttcctgggcaagagtgtatgcatacaaagttttcacttttgtgaaatgtaatttttctgtttttgcaaagggatgaggtgattggaattgctttgaccatgctgcctttattctcaaactggcaaacttagcatgttaggtgtattaacctcatcagtcttgaagaacatgtggctcatgagtataacacttctgtagaggactccctgacaaaagtgaagaattaacttctcctccagaacaagtgcaattcagaaggcagctctgcattctaccttgcttgactggaattgtctgaagctttttctggcctcttttctctagtcggccacccctgaagtgctgaggtctaagtggtttacctcgtgctgatagatgg

SEQ ID NO: 736 - DNA, 341 bp, Homo sapiens
ctgctgtgctacaacgtcggtcagaaaatgaagagtttgttgaagtgggaagattggggccttctgattattttggtgaaattgcactactgatgaatcgtcctcgtgctgccacagttgttgctcgtggccccttgaagtgcgttaagctggaccgacctagatttgaacgtgttcttggcccatgctcagacatcctcaaacgaaacatccagcagtacaacagttttgtgtcactgtctgtctgaaatctgcctcctgtgcctcccttttctcctctccccaatccatgcttcactcatgcaaactgctttattttccctacttgcagcgccaagtgg

SEQ ID NO: 737 - DNA, 456 bp, Homo sapiens
aaaataaataaagaaaaatcttgtttcctttggcatctttagaaaataaactacagcaataaaaagaggtgattgtataaagacatgcgtaagcaaacatatggggaaaaaacagcaacttgtgtttagtatgtaataatatcagctataagagtttactgttaattaggaaagccttacaaatttttggaagaaccttcacatctttaacattacaatatatttaataatggttcttttattgcttctagtatcaagattattgagaagtcaaatgaagttatgctgacgttatgattcaaaaattatcttccaaacatttaacgattataatttaagataaataacacttaaagaaagcaaaccttttataatatgactttcaatatacagccttactttaattcagtctgattccattacatttttgttattttgtattggtcctaaaaattt

SEQ ID NO: 738 - DNA, 481 bp, Homo sapiens
  misc_feature 469: n = A,T,C or G
aaacaaacagaagattgtttttccacatagcatggattctggagatgggtggctaatggtattggttcaacaactccacggaggtaggggtcacgtcttggatccttttgccttaatctcagtgctcgttacttcatggtcccaagatggctgctgtatccccaagaatcatgtctgcgttcaaggaaggaggggtggaggaagaggaagggccaaactagctggacccgtcaccttctatcagaaagtaaaacctcgtcagaagtctgtttcctgctctctccctctgcatatcttcacttagatgcccttggcccgagccagctaccattgcacctctagctgcaaacaaagctaagacagcagggaacagaattgtcatggctgaatagaccaatcgtgttccatctactgagactggcacactgcctcctgcaataaaactgggatcccattaccaagagagaangcagaattgtgt

SEQ ID NO: 739 - DNA, 192 bp, Homo sapiens
ccttgaagggacctcagagcaaaggaagagacctgggtgtggtgaggcatcccagggcatggaagggaccggttgtgctgtgggaatccactggcccctccttggttaaaaaagcacaacacatcatacatatttaccagaccagaagcgctggccccaagtctccctaacctggtcgggggaacctcctgg

SEQ ID NO: 740 - DNA, 456 bp, Homo sapiens
taggtgccttattggtttatgacattgctaaacatctcacatatgaaaatgtagagcgatggctgaaagaactgagagatcatgctgatagtaacattgttatcatgcttgtgggcaataagagtgatctacgtcatctcagggcagttcctacagatgaagcaagagcttttgcagaaaagaatggtttgtcattcattgaaacttcggccctagactctacaaatgtagaagctgcttttcagacaattttaacagagatttaccgcattgtttctcagaagcaaatgtcagacagacgcgaaaatgacatgtctccaagcaacaatgtggttcctattcatgttccaccaaccactgaaaacaagccaaaggtgcagtgctgtcagaacatctaaggcatttctcttctcccctagaaggctgtgtatagtccatttcccaggtctgagattt

SEQ ID NO: 741 - DNA, 315 bp, Homo sapiens
ccagataaggctgacttcagtgctgatgcaagttcctttttggtccttctctggtaggcgaaggcaatatcctgtctctgtgcattgctgcggttggtcaaaatgttgacaatggtgacctcatccacacctttggtcttgatggctgtttcaatgttcaaagcatcccgctcagcatcaaagttagtataggctttgacagacccatatgcacttgggggtgtagagtgatcaccctccaagctgagcttgcacaggatttcgtgaacagtagacattttgaaggaagctgggccgtgcgccgagagctgagag

SEQ ID NO: 742 - DNA, 147 bp, Homo sapiens
  misc_feature 108, 141: n = A,T,C or G
caagacctcaggcatagagttcaagggccttgcccacggtttcagagctagttcatattcaaaagaaataaagaaaacagtgacttatcccgctacccaagcgtgtanagccgcgcgctgtactgcttccgatatgtgccncagagc

SEQ ID NO: 743 - DNA, 330 bp, Homo sapiens
ctgagagcattaagaaccaaatgactgtgaaagaatgggagaaagtgtttgagatgagtcaagataaaaatctataccacaatctttgtaccagcctgttccctactatacatggcaatgatgaagtaaaacggggtgtcctgctgatgctctttggtggcgttccaaagacaacaggagaagggacctctcttcgaggggacataaatgtttgcattgttggtgacccaagtacagctaagagccaatttctcaagcacgtggaggagttcagccccagagctgtctacaccagtggtaaagcgtccagtgctgctggcttaacagcag

SEQ ID NO: 744 - DNA, 315 bp, Homo sapiens
cccaagaggaaaagagagaaaaaagagaaaaagaagaaacggaaggcagagaagcatcgaggccgagctggggccgatgaagatgacaaggggcctagggcaccccgcccacctcaacctaagaagtccaagaaagcaagtggcagtgggggtggcagtgctgctttaggcccttctggctttggaccttctggaggaagtggcaccaagctccccaaaaaggccacaaagacagccccacctgccctgcctacaggttatgattcagaggaggaggaagagagcaggcccatgagttacgatgagaagcggcag

SEQ ID NO: 745 - DNA, 473 bp, Homo sapiens
  misc_feature 463: n = A,T,C or G
cctcagaagccaggtctttgtccttccctcctggttcctgcctccttttctcccccaaattgagtcccagaaaccagaattccttttcctcaaagcaggtcttagaaactagaattcctttctctcaaacccagccataaaacctagctaggtcactctctcccttctccctggaagatcctcattcccgagggggatacccaggggaaggggaattgtacagagcggctttgctgggtttcccgactctgtccatcaccgttaggccagatcctttgtgtccaatcacatttctgcgtggatgttcattcatcaaacctaaatacaaaaataaacgtttttatggcctctttttaccagctccgaggtgattttcatattgaattgcaaattcgaagaagcagcttcaaacctgccggggcttctcccgccttttttcccggcggtgggagaagtagattgnagccagttga

SEQ ID NO: 746 - DNA, 510 bp, Homo sapiens
  misc_feature 20, 289, 504: n = A,T,C or G
tttttttttttcaaactganaaaggttttacttttaagacaaaaaaaatagcattaacacacatccaaatgccagtgcaggagttcactgggtttataaaagagaaaactaaactcaagtgtcaaataaaaactggagccgtcaagaatgactgcttgtggcaacacaggtgtaacatgtgcttgtctaaagtcgttctgtgtttgtggatatgtggaaatgcatgacgagggaaacgatgcaaggcaaaatgacaggtgctcaaagctttaagatccttttcttcacncttgtgtgctcttgttttgcttttgagaattagggtaattcgcaggtcattttacaaagaactgtaatatcaaagaacacttccaaacggctaaaataggctcaaggtcactattaaagtgataaagggaggtccgtgggggaaaagtttgtgttctcaaagccagatttcacaccatggcaggcactaaatctagttacatgtgcttgcagtanaaaaag

SEQ ID NO: 747 - DNA, 312 bp, Homo sapiens
ctgcctgcctgccagaggccaagcattcctaagcgtgggctgggggaggccctgcccctctgtagcagcagagcagacagggcagtgggagaaccatgtgggtaggagggcatcaggtctcaagagcctctcccctgctcaggactgggtctagacaaggccacgtgtgatagggtggtaagccctgggccatatggaggagcctggggcccatcttggttctgctgctgagttgctgggtggctttaggcaagtcccttcttgtcccttggtcactctgtttcctggctagcactgccagcaaggcctcca

SEQ ID NO: 748 - DNA, 502 bp, Homo sapiens
  misc_feature 476: n = A,T,C or G
ccaccacatcgaagaatgccaatgcctccctggtgtactccttcctgtataagacaatagaggtattctgcgaatacttcaaggagctggaggaggagagcatccgggacaactttgtcatcgtctacgagttgctggacgagctcatggactttggcttcccgcagaccaccgacagcaagatcctgcaggagtacatcactcagcagagcaacaagctggagacgggcaagtcacgggtgccacccactgtcaccaacgctgtgtcctggcgctccgagggtatcaagtataagaagaacgaggtcttcattgatgtcatagagtctgtcaacctgctggtcaatgccaacggcagcgtccttctgagcgaaatcgtcggtaccatcaagctcaaggtgtttctgtcgggaatgccagagctgcggctgggcctcaatgaccgcgtgctcttcgagctcactggccgcagcaangaacaaatcagtagagctggaggatg

SEQ ID NO: 749 - DNA, 434 bp, Homo sapiens
cctggagataaagtccctccaattaaaccaaacgctggggaagaatctgtcatgaatcttgacaaattgagatttgctgatggaagcataagaacatcggaactgcgactcagcatgcagaagtcaatgcaaaatcatgctgccgtgttccgtgtgggaagcgtgttgcaagaaggttgtgggaaaatcagcaagctctatggagacctaaagcacctgaagacgttcgaccggggaatggtctggaacacggacctggtggagaccctggagctgcagaacctgatgctgtgtgcgctgcagaccatctacggagcagaggcacggaaggagtcacggggcgcgcatgccagggaagactacaaggtgcggattgatgagtacgattactccaagcccatccaggggcaacagaagaagccctttgaggagca

SEQ ID NO: 750 - DNA, 493 bp, Homo sapiens
ccaagacagctaacaaggaccacttggttacagcctataaccatctttttgaaactaagcgttttaagggtactgaaagtataagtaaagtgtctgagcaagtaaaaaatgtgaagcttaatgaagataaacccaaagaaaccaagtctgaagagaccctggatgagggtccaccaaaatatactaaatctgttctaaaaaagggagataaaaccaactttcccaaaaagggagatgttgttcactgctggtatacaggaacactacaagatgggactgtttttgatactaatattcaaacaagtgcaaagaagaagaaaaatgccaagcctttaagttttaaggtcggagtaggcaaagttatcagaggatgggatgaagctctcttgactatgagtaaaggagaaaaggctcgactggagattgaaccagaatgggcttacggaaagaaaggacagcctgatgccaaaattccaccaaatgcaaaactcac

SEQ ID NO: 751 - DNA, 454 bp, Homo sapiens
ccttatttctcttgtcctttcgtacagggaggaatttgaagtagatagaaaccgacctggattactccggtctgaactcagatcacgtaggactttaatcgttgaacaaacgaacctttaatagcggctgcaccattgggatgtcctgatccaacatcgaggtcgtaaaccctattgttgatatggactctagaataggattgcgctgttatccctagggtaactcgttccgttggtcaagttattggatcaattgagtatagtagttcgctttgactggtgaagtcttagcatgtactgctcggaggttgggttctgctccgaggtcgccccaaccgaaatttttaatgcaggtttggtagtttaggacctgtgggtttgttaggtactgtttgcattaataaattaaagctccatagggtcttctcgtcttgctgtgtcatgcccgcctctt

SEQ ID NO: 752 - DNA, 223 bp, Homo sapiens
cctttcctacagggtctgagaaggccaccgcagtcatttcttcccttctgtcagacataattcctcagtttagccttcccacctctatacagtctgataacagaccagccttcattagtcaaatcagccaagcagtttttcaggctcttagtattcagtgaaacctttatatcccttacggtcctccgtcttcaagaaaagtagaacggactaaaggtctttt

SEQ ID NO: 753 - DNA, 422 bp, Homo sapiens
ctgcagccgctgcagctactcctgctgtccgcaccgttccacagtataaatatgctgcaggagttcgcaatcctcagcaacatcttaatgcacagccacaagttacaatgcaacagcctgctgttcatgtacaaggtcaggaacctttgactgcttccatgttggcatctgcccctcctcaagagcaaaagcaaatgttgggtgaacggctgtttcctcttattcaagccatgcaccctactcttgctggtaaaatcactggcatgttgttggagattgataattcagaacttcttcatatgctcgagtctccagagtcactccgttctaaggttgatgaagctgtagctgtactacaagcccaccaagctaaagaggctgcccagaaagcagttaacagtgccaccggtgttccaactgtt

SEQ ID NO: 754 - DNA, 502 bp, Homo sapiens
  misc_feature 496, 497: n = A,T,C or G
ccatcttcggaccccccaacaccctctacgaaggcggctacttcaaggcgcatattaaatttcctattgactacccctattcaccacctaccttcagattcttgaccaaaatgtggcaccccaacatttatgagaatggagatgtatgcatttcgattcttcatccgcctgtagatgacccacagagtggagaactgccttctgaaaggtggaatcctactcagaatgtgaggactatcctattaagtgtaatctcactgcttaatgagcccaacaccttctccccagccaatgtcgatgcttcagttatgttcaggaaatggagagacagtaaaggaaaagacaaagaatatgctgaaattattaggaaacaagtttcagccactaaggccgaagcagaaaaggatggagtgaaggtccccacaaccctggcggaatactgcatcaaaactaaaagtgcctttcaatgacaacagctcagatttgctttacgacnncttgt

SEQ ID NO: 755 - DNA, 322 bp, Homo sapiens
ctgatcaagactggagacaaagtgggagccagcgaagccacgctgctgaacatgctcaacatctcccccttctcctttgggctggtcatccagcaggtgttcgacaatggcagcatctacaaccctgaagtgcttgatatcacagaggaaactctgcattctcgcttcctggagggtgtccgcaatgttgccagtgtctgtctgcagattggctacccaactgttgcatcagtaccccattctatcatcaacgggtacaaacgagtcctggccttgtctgtggagacggattacaccttcccacttgctgaaaaggtcaagg

SEQ ID NO: 756 - DNA, 268 bp, Homo sapiens
aaagaaaaaaagtaaatccactttatggtggacttcagctatggacaaatttgggatcagtgttctccagtctgaacatagtcttctgttacctgggagagagtggtcaggtactgccagctcagggcagccaaaagcatgacaaatgacaggtagatgggggagtagtggcttcgggaaatcagctgacagttgggaagattctgcgtccggatggtggagatgatctgccttgttttgctagaagatgggtctgagtcggggattc

SEQ ID NO: 757 - DNA, 391 bp, Homo sapiens
  misc_feature 322, 354, 366: n = A,T,C or G
cctgacattcctgccttcttatattaataagaaaaataaaacaaaatagtgttgaagtgttggggcggcaaaaatttttgggggtggtatggagagagaatgggcgatgtttctcagggctgcttcaagcgggattaggggcggcgtgggaacctagagtgggagagattaagctgaatggaagatcttgtggtaaggggtgatattgtggggttgttagaagaaacatttgtcgtatagaatgattggtgatggcctggatacggttttgtatgaattgaaaaatggaataagagaaggagagaaacaggtataaaaggtntaagaattgggaggacctagacatctgattanagagtgcctaangaggttcagcatagtccttccagca

SEQ ID NO: 758 - DNA, 450 bp, Homo sapiens
  misc_feature 450: n = A,T,C or G
ccacagctaacatcattgcagcacctttactccttcggcttctttttgccagcaccaacattggcctttgcagtccccctgactttcttcattctgttcttgcgttcctttcgttgctttcttgaggtctttttcttctcatacaggccatgtcttgcaagtctatgtttgggttcatttttctttgcataatccagggaatcataaatcatgccaaagccagttgtcttgccaccaccaaaatgagttctgaatccaaatacaaagatgacatccggtgtggtcttgtacattttggctagtttttcccgaatttctgtcttaggcactgtcgccttcccggggtgaaggacatcaatgaccatttgtttcctctgaagtagtcggttggtcatgaactttctagtgcggatagttacggtgtcgttcatgatggcgatctatcttcan

SEQ ID NO: 759 - DNA, 419 bp, Homo sapiens
ccagccatctggtttcagccggaagctaacaccctcattctgagtccaggctagtgggtggtggctgaggacccagttggttgaggagtccaactagaaaccaggagaggtagcagaataattaaacccctataggggtggcaagggcctctggccctgggtggaatgtcccatttccttcatcactgagtgggcttccccaaggcagaaaggtttgtcccggagcaagaattttgtttgaatgcgtgtaacttaaattaaccttgtggacctctgctcagctccgctcggctctgcccgatgagctccatccaggctccgcttgccggtggaaaaggctccttagaagccggcaatgagctccatccccacgcggtgccagtgtgccttccgctcacccctcggaggggtgatgaagg

SEQ ID NO: 760 - DNA, 396 bp, Homo sapiens
ctgaggccgagcccaactaggtcctgggcacccctgcaggtgggagtggtccttgtcctcctggtatccagcagacacccccctctccccaccagccccattctcaggtcctttcctctttgtcaccaacaccaagaatctgtccagggttcttggcttatcttttatctcttttcactcctagagaggaattgcaattgactcagaatgacacattttggcaccacgtgtgtagaaagcccccactgttagatgatagcctcgtgaaattcatgtttctgtattctcctatttcttttcaaaaactaattttttttttagtgtaataaatcctaagagggaactgatttaagaaacaaggccgccaaacaaaggcagcagttccgactccagcag

SEQ ID NO: 761 - DNA, 362 bp, Homo sapiens
ctggtgcccattgctgttgttcttgatgccagcagctattttacagaagcagtccaggaagactttatcatcaccactgtgatcttcatcatatttatcaaagttgcagtatggtttgaatcgctccaccaagatctgcattttctccacctctccaaaggaaaggtacgggatgatgcgaagcaggccctggagcacactggggttggagcgaacaaaggtgctgttgatctggtccaagagcatcaccagttgatccttgtcacctgtcaggaggaggttgcccttgtcctcactcaggggctcagcattggactcatctagaatgatctccatgatgctaagcacctgctcagccacag

SEQ ID NO: 762 - DNA, 439 bp, Homo sapiens
ctgaccagcaccatggcggttggcaagaacaagcgccttacgaaaggcggcaaaaagggagccaagaagaaagtggttgatccattttctaagaaagattggtatgatgtgaaagcacctgctatgttcaatataagaaatattggaaagacgctcgtcaccaggacccaaggaaccaaaattgcatctgatggtctcaagggtcgtgtgtttgaagtgagtcttgctgatttgcagaatgatgaagttgcatttagaaaattcaagctgattactgaagatgttcagggtaaaaactgcctgactaacttccatggcatggatcttacccgtgacaaaatgtgttccatggtcaaaaaatggcagacaatgattgaagctcacgttgatgtcaagactaccgatggttacttgcttcgtctgttctgtgttggtttta

SEQ ID NO: 763 - DNA, 449 bp, Homo sapiens
cctcggaggagagcgccctcaaccacctccagaacccgggcgacgcggccgagggccgggcggccaagaggtgcgagaaggccgaggagaaggccaaggagattgcgaagatggcagagatgctggtggagctggtccggcggatagagaagagcgagtcgtcgtgagcgcggtcggcggtttccagccaatggattctggtcaactggtggagattggctgacaccctggagaagccgaaaccagagagccttttgttttctcttttttcctgtctatgctctgtctcacttaacactacgttttctgctatggtctgtggttgatgacctcaatatgagtttcgattgttaacgtgtttttgtttggaaagtaattttgtttgaaaatgctctcacatacaggaattagggcctagattgtaagctcttgcagcagtcacatttgtt

SEQ ID NO: 764 - DNA, 500 bp, Homo sapiens
  misc_feature 431, 455: n = A,T,C or G
ccaggctggtctcaaactcctgacctcaggtgatccgcccaccttggcctcccaaagtgttgggattacaggcaggagccaccgtgcccggccgaatcttattcttactggttactgtagaataatttcagtcctgtcccttatgattctgaatccaattatataaaggaaaataacttttcatgtgaatgtaaaatgtttacacacataagtaagacagtttacaagacaaactggtctacacagacaaaggtctatattaaagttcaatctggaccctagaattcttgtcatgggcctcttgtgaagagtctgccctactcaggaatgggcacatgggttaacaattttcacttatttactgagggagtggagtatagatgtagggaggtgaaattaccattcctgggaataaatgtaggattttaatngaatgatagaatttattgtacaantcacattggtgagtcttattcaggtattaggcttaactatttaga

SEQ ID NO: 765 - DNA, 363 bp, Homo sapiens
ctggcttcactgctcaggtgattatcctgaaccatccaggccaaataagcgccggctatgcccctgtattggattgccacacggctcacattgcatgcaagtttgctgagctgaaggaaaagattgatcgccgttctggtaaaaagctggaagatggccctaaattcttgaagtctggtgatgctgccattgttgatatggttcctggcaagcccatgtgtgttgagagcttctcagactatccacctttgggtcgctttgctgttcgtgatatgagacagacagttgcggtgggtgtcatcaaagcagtggacaagaaggctgctggagctggcaaggtcaccaagtctgcccagaaagctc

SEQ ID NO: 766 - DNA, 295 bp, Homo sapiens
gtgcaaccgagagacaacattagattagctgtgcactttgcaagaagaggggaagaggacaatacgttcatcctgagagctgcttctgagaacctcagggaagaagtctagaaccctgatctacataaagtgacagatgacggactcgttgtggaggactcctgaagtagtgtccctgattagaatgctgatttcttccccaaaggtgatgtgggcacagaactgagctgtgtgaatgggaggccaaataagctctgctgaatttgctctggcagcccaagtccttaaggtgagg

SEQ ID NO: 767 - DNA, 210 bp, Homo sapiens
ctggttatccgagaagttccgaggattctccttggatttcttagggaaccagttgggatccccagagaagagcccatcatctcgggctactgccagcccacccagattcatcagcgtccgctgcacacaggccatgttctttccttcccagaggtccacagtttggaagatgtcagtggtgttaatgccatagcgctcagacctgcccgg

SEQ ID NO: 768 - DNA, 460 bp, Homo sapiens
ccaattgaaacaaacagttctgagaccgttcttccaccactgattaagagtggggtggcaggcattagggataatattcatttagccttctgagctttctgggcagacttggtgaccttgccagctccagcagccttcttgtccactgctttgatgacacccaccgcaactgtctgtctcatatcacgaacagcaaagcgacccaaaggtggatagtctgagaagctctcaacacacatgggcttgccaggaaccatatcaacaatggcagcatcaccagacttcaagaatttagggccatcttccagctttttaccagaacggcgatcaatcttttccttcagctcagcaaacttgcatgcaatgtgagccgtgtggcaatccaatacaggggcatagccggcgcttatttggcctggatggttcaggataatcacctgagcagtgaagccagacctgc

SEQ ID NO: 769 - DNA, 251 bp, Homo sapiens
ccaattgatttgatggtaagggagggatcgttgacctcgtctgttatgtaaaggatgcgtagggatgggagggcgatgaggactaggatgatggcgggcaggatagttcagacggtttctatttcctgagcgtctgagatgttagtattagttagttttgttgtgagtgttaggaaaagggcatacaggactaggaagcagataaggaaaatgattatgagggcgtgatcatgaaaggtgataagctcttc

SEQ ID NO: 770 - DNA, 493 bp, Homo sapiens
  misc_feature 478: n = A,T,C or G
cacgccgccgcttgtgctgcagccatgtctctagtgatccctgaaaagttccagcatattttgcgagtactcaacaccaacatcgatgggcggcggaaaatagcctttgccatcactgccattaagggtgtgggccgaagatatgctcatgtggtgttgaggaaagcagacattgacctcaccaagagggcgggagaactcactgaggatgaggtggaacgtgtgatcaccattatgcagaatccacgccagtacaagatcccagactggttcttgaacagacagaaggatgtaaaggatggaaaatacagccaggtcctagccaatggtctggacaacaagctccgtgaagacctggagcgactgaagaagattcgggcccatagagggcctgcgtcacttctggggccttcgtgtccgaggccagcacaccaagaccactggccgccgtggccgcaccgtgggtgtgtccaagaanaaataagtctgtagg

SEQ ID NO: 771 - DNA, 552 bp, Homo sapiens
aaatatgaatggcaaattttggtttttagcttttacattttattatcttaattttataaatgctaatatttcttttgtgataagttatagcatctcataaagtttgttctatttgaagttttttagagtacttgagaaatgaatttagtctgcaggtagtaagtatgctactaaaatacgttagatctaaatccttttatttggtataaaaatgcaatattgagaatcaaaacttgtttttaagagaactatagattctacacaacctgatttcaagtaattattcatagtatttatagttgtcttggcaaagtgattgtaaaattctgtaggacctattcacacttcttccttcttccatatacttctctggttttccccatagttcccctataatttcaagtttgttgaaacctgttaattttagtgggggattagaagaaaaacttggtggtttcttagcatgatggtgtatgtatgtggtaatggaaagtctgtaaaagtaaatatagtgtagcaaaaaagatttcactgagtattttagatactagt

SEQ ID NO: 772 - DNA, 487 bp, Homo sapiens
  misc_feature 444, 486: n = A,T,C or G
aaaatttcatcataggaatttgggtgaccttttgcactcagtattaaaaaaaaccatcaagttgctctttggaacagtagcatttaggtttgtttttttttttttgtcacacttgtttatttctttgggatgttgctgtgtgtcatggaagaaacgctcccctgaaaactgtaaccaaacaaagtttggttaaaacaaagttggttcctttgttttcatggaaatgtcagacaactatgaaaagctaaggaagcatgttgaactgaaggtctggctttggtaaattaggcagagatgttctcagcagcaaacaggtaaaatctgacatcgagaagcattattttaatgtaggaccagttataatcttaaagaactgactaggttctaaaataatagaactgagaaataggactgagaaatgaccaacatcaagtataatacggnacacttagcacttgtttctatagaaaacatttcaaatcaagnt

SEQ ID NO: 773 - DNA, 490 bp, Homo sapiens
ctgcttccattggtgggtcatttttgctgtcaccagcaacgttgccacgacgaacatccttgacagacacattcttgacattgaagcccacattgtccccaggaagagcttcactcaaagcttcatggtgcatttcgacagattttacttccgttgtaacgttgactggagcaaaggtgaccaccataccgggtttgagaacaccagtctccactcggccaacaggaacagtgccaataccaccaattttgtagacatcctggagaggcaggcgcaagggcttgtcagttggacgagttggtggtaggatgcagtccagagcctcaagcagcgtggttccactggcattgccatccttacgggtgactttccatcccttgaaccaaggcatgttagcacttggctccagcatgttgtcaccattccaaccagaaattggcacaaatgctactgtgtcggggttgtagccaattttcttaatgtaagtgct

SEQ ID NO: 774 - DNA, 476 bp, Homo sapiens
  misc_feature 422: n = A,T,C or G
ccactagaggtctgtgtgccattgcccaggcagagtctctgcgttacaaactcctaggagggcttgctgtgcggagggcctgctatggtgtgctgcggttcatcatggagagtggggccaaaggctgcgaggttgtggtgtctgggaaactccgaggacagagggctaaatccatgaagtttgtggatggcctgatgatccacagcggagaccctgttaactactacgttgacactgctgtgcgccacgtgttgctcagacagggtgtgctgggcatcaaggtgaagatcatgctgccctggggcccaactggtaagattggccctaagaagcccctgcctgaccacgtgagcattgtggaacccaaagatgagatactgcccaccacccccatctcagaacagaagggtgggaagccaganccgcctgccatgccccagccagtccccacagcataacagggtctcctttggcag

SEQ ID NO: 775 - DNA, 419 bp, Homo sapiens
ccagcttcttgaccagttttttattcttgttgagttttttcagcgcctcgatgtccatgtgggggatatccacggccttagcctcgtcacagtgctgctggtcccccaggacacacacagagaacttagggcggggagtggacttaagcctgacggtgcccgagaagcgcttgtccttctggggatcatagttcttcaagctgatctgcaactccaccgtctccaggaacttgcggcgcttgcgcctttagtgatgatgattaaaggtggtggctgtggccttgaaaatagtcatgtgaaaactcatcaccttaaggtgttaagtgtaaggatcttcacgatgaaatttctgtaaatggtgcagtcagcctcagtttccaaagccggaaaaggatcctctagtagccacggtgtggcag

SEQ ID NO: 776 - DNA, 400 bp, Homo sapiens
ccacagacgtcattcgctggactccctgggcactaaatgagtgtctagcatccttaaggctgctcaacacacagccccagactctgaatatgattccaagaaatattctgaaaaaagtcacatcgctggaataaacagtttcccaagataactgctttgaaaaccagtcccgttagtttctaaaagcccacctacggcaccttccttccatcagagtctgctgcccgggtgggctgggaaggagggagatacaaagaagaaagtaggcatgatcactgggtcggttcccaagccaccctcaccctccaagaaggcatgaatggaacaaccccgagaacagagcacgtgtgaagaaccaacacgacaggcacgggatggcagcactggtggaagggaggca

SEQ ID NO: 777 - DNA, 398 bp, Homo sapiens
ccaaaggggtctctagctgctgctctgctgctcctgctcatggatgagtttggcgatggggccggtgatgccgcctatcaaggtccagtactcatcgaagctgatgcgcccatcatgattggcatccaggttctggatgagcttatccgcagccttccggttccctgtgtccgacagcatgtggttcagctctttctggagcatctcgcggaagctgctcttgctgatcttgttcttgaccaggctgtacttagacacatatttgtagaagttttccaccaggacaatgactgccttctccagctccgtgtagcagtctgacatctccctgcttcgcctgctggcggggcctgctgcctcagtctgcctcctctccagcagggctctggggcctgggc

SEQ ID NO: 778 - DNA, 462 bp, Homo sapiens
atcgccatcatgaacgacaccgtaactatccgcactagaaagtccatgaccaaccgactacttcagaggaaacaaatggtcattgatgtccttcaccccgggaaggcgacagtgcctaagacagaaattcgggaaaaactagccaaaatgtacaagaccacaccggatgtcatctttgtatttggattcagaactcattttggtggtggcaagacaactggctttggcatgatttatgattccctggattatgcaaagaaaaatgaacccaaacatagacttgcaagacatggcctgtatgagaagaaaaagacctcaagaaagcaacgaaaggaacgcaagaacagaatgaagaaagtcagggggactgcaaaggccaatgttggtgctggcaaaaagaagtgagctggagattggatcacagccgaaggagtaaaggtgctgcaatgatgttagctgtgg

SEQ ID NO: 779 - DNA, 288 bp, Homo sapiens
ctgacaagcccttgcgcctgcctctccaggatgtctacaaaattggtggtattggtactgttcctgttggccgagtggagactggtgttctcaaacccggtatggtggtcacctttgctccagtcaacgttacaacggaagtaaaatctgtcgaaatgcaccatgaagctttgagtgaagctcttcctggggacaatgtgggcttcaatgtcaagaatgtgtctgtcaaggatgttcgtcatggcaacgttgctggtgacagcaaaaatgacccaccaatggaagcag

SEQ ID NO: 780 - DNA, 470 bp, Homo sapiens
  misc_feature 400: n = A,T,C or G
gggcaacaagagcaaaacttcgtctcaaaaaaagaaaactggctagaatgcacttcaacttaagtcctgggagctacgctaattcatggagaaccacagaggtttaataggcatttctatacctggatcagccccaaggacagtattaccctgtactgcccttcctattactattttcagtcatttactaatattgggctgtagtactttcacgtttaagctttggctattcagagctcactacgtttaatcttcagttacctgaatggtgtttaccttctggtgtggatcatcccggcttgtgttagtgctctctctttggaagaagccaggatttaagatcgagttagcctagatgtggcccagcagggtacagaaggggaaaggctgcagaaaaccnggcgtattttcgtgcaaagaggtttttgcgccatttatttatggttttcaccgtcgtatgagaggaccag

SEQ ID NO: 781 - DNA, 520 bp, Homo sapiens
  misc_feature 99: n = A,T,C or G
aaatcaataagtaatctaggactagcattatgtttgctagacctggcatttgctcggtacataaggttcaaagtttcctttcctttttttatttatttnatattttgcaatgttttttttccataatatttaagtttttcgatgtttagatatttttcttcggtgaagcacaagtttcttttcatggtccctgatcaattttaaacagttggaacaccggtggcactgttaactgctttctgggcagcctctttagcttggtgggcttgtagtacagctacagcttcatcaaccttagaacggagtgactctggagactcgagcatatgaagaagttctgaattatcaatctccaacaacatgccagtgattttaccagcaagagtagggtgcatggcttgaataagaggaaacagccgttcacccaacatttgcttttgctcttgaggaggggcagatgccaacatggaagcagtcaaaggttcctgaccttgtacatgaacagcaggctgttgcattg

SEQ ID NO: 782 - DNA, 437 bp, Homo sapiens
caggtctgcatacctgcaacacttatgctaccgcaatgacaaggtgaagactgacgtgcggaagctcaagggcatcccagtactggtgggattgttagaccatcccaaaaaggaagtgcaccttggagcctgtggagctctcaagaatatctcttttggacgtgaccaggataacaagattgccataaaaaactgtgatggtgtgcctgcccttgtgcgattgcttcgaaaggctcgtgatatggaccttactgaagttattaccggaaccctgtggaatctttcatcccatgactcaatcaaaatggagattgtggaccatgcactgcatgccttgacagatgaagtgatcattcctcattctggttgggagcgggaacctaatgaagactgtaaaccacgccatattgagtgggaatcggtgctcaccaacacag

SEQ ID NO: 783 - DNA, 492 bp, Homo sapiens
aaaagttgaggagtttattagggaaatatgagaggcatagacactccaagtgacagaaagaaaagtctgaaaatgtcccttcaagccaagtgggggcctggccttgacctctccaaatcaacaagaaactggtgggttagcaacaacattctctggcagccacattgccagggcatgagtgtcttgaccaggactgccccgcacttcccaccaaaggtggggaggagacaaagactgttcacagaagcagtgcaaaggcaatgagaactttaaggaaagtttgagagagagagaaagaaagatagaggtgaggaggaccttcacaaagagtcccaggcttttggctgtgaatgtctcaaatacattgacaagtagatgtataaaatgttactgaaaaggtaaaatgcctaacgtcgtttccaacggttcctctgaacttcttcccacataccacaccacaccccagatggcagagcccaaaggccacacttt

SEQ ID NO: 784 - DNA, 516 bp, Homo sapiens
ccaaaagaagtaagacagcttgctgaagatttcctgaaagactatattcatataaacattggtgcacttgaactgagtgcaaaccacaacattcttcagattgtggatgtgtgtcatgacgtagaaaaggatgaaaaacttattcgtctaatggaagagatcatgagtgagaaggagaataaaaccattgtttttgtggaaaccaaaagaagatgtgatgagcttaccagaaaaatgaggagagatgggtggcctgccatgggtatccatggtgacaagagtcaacaagagcgtgactgggttctaaatgaattcaaacatggaaaagctcctattctgattgctacagatgtggcctccagagggctagatgtggaagatgtgaaatttgtcatcaattatgactaccctaactcctcagaggattatattcatcgaattggaagaactgctcgcagtaccaaaacaggcacagcatacactttctttacacctaataacataaagcaagtgagc

SEQ ID NO: 785 - DNA, 457 bp, Homo sapiens
ccacaaacacctctcggcggccaggctgtttcagtcgaccacggcacacttccccaaattccccagctccgatcacctcctcgatcttgacgcaggacacgtcgatctccttggcaaactcccgaacagcctcattagggtcctcgtaggtaaaagggtcaatataaaccttcattccaggagcaactggagggagaagaggtgggcgtgagagggtaacgtcaagccagcctctccctgcgatgggcacagctccagcaggctccctgctgagcccagccccatattcctctgtgttgctgccctaatcctccagctcccatgagaactcctggtgaccataaaggctagacacctaggattctactcctagtttttctctctcatctctcatcacatccagacctctctcagattcatgcctcccctggttcccactgccccgaccttgtccagg

SEQ ID NO: 786 - DNA, 306 bp, Homo sapiens
aaaatgagccgggcgcggtgactcacgcctgtaatcccagcactttgggaggccaaagcaggcggatcatgaggtcaggagatcaagaccatcctggctaacacggtgaaaccccgtctctactaaaaatacaaaaaattagccgggtgtggtggcgggcacctgtagtcccagctactcgggaggctgaggcaggagaatggcgtgaagccgggaggtggagcttgcagtgagccgagatcacaccactgcactccagcctggacaacaaagcaagactctcaaaaaagaaaaaaattttttttt

SEQ ID NO: 787 - DNA, 480 bp, Homo sapiens
ctgctgcttcagcgaagggtttctggcataaccaatgataaggctgccaaagactgttccaataccagcaccagaaccagccactcctactgttgcagcacctgcaccaataaatttggcagcagtatcaatgtctctgctgattgcactggtctgaaactccctttggattagctgagacacaccattctgggccccattaaataccgtagagccctctccagtcctactagcctctggtcgagataacactgatgcagaaattggtctgtatgcaactctggatccagctcggatcagagctgctcctgctgctgctgcagccccagctaaggttgaagccaaggaagagtcggaggagtcggacgaggatatgggatttggtctctttgactaatcaccaaaaagcaaccaacttagccagttttatttgcaaaacaaggaaataaaggcttacttctttaaaaaaaaaaaaaaaaa

SEQ ID NO: 788 - DNA, 379 bp, Homo sapiens
ccttctttggctccacctagtatgataatcatgggttctgttttagttgatgagaagtggctcctatgaatgcctctgctcaatttctttttattttactttattttatttttaggggtctcgccaactcctgggctcaagtgattctcctgcttccacctccccacagtgctgggattacaggcatgagccaccacgcctggctctctgttcttttcagtgtctccgtgccatcagtcagcagtgcttacatgtttagcatattgtcatgcagtttctcttctgttcccacgagatatttttggacaaaaaattgacaaaagtacatgtgtttttccccacctatcccttagaaaacctaatgtgtactgctattttt

SEQ ID NO: 789 - DNA, 262 bp, Homo sapiens
ccaaaaaaattaaacaaaatctcttggtttcctttacagtttctttttttgcgttttatttttttcaaattgcattttacagtagaaatgcagaccactttggatagctatggctcgatacttctgggtgccctcctcctaagacatcctcttcttacattccactgaacagaaaaccatcccttctactggcatgaacttctgcccaatgaggcatttgctgcagcaagagcacagaaagcactctgtggatgcatgccag

SEQ ID NO: 790 - DNA, 365 bp, Homo sapiens
cctacagacttatttcttcttggacacacccacggtgcggccacggcggccagtggtcttggtgtgctggcctcggacacgaaggccccagaagtgacgcagccctctatgggcccgaatcttcttcagtcgctccaggtcttcacggagcttgttgtccagaccattggctaggacctggctgtattttccatcctttacatccttctgtctgttcaagaaccagtctgggatcttgtactggcgtggattctgcataatggtgatcacacgttccacctcatcctcagtgagttctcccgccctcttggtgaggtcaatgtctgctttcctcaacaccacatgagcatatcttcggcccacac

SEQ ID NO: 791 - DNA, 425 bp, Homo sapiens
  misc_feature 287: n = A,T,C or G
ttggtgctccccctgtgatgagaaaagggttactgttgcaggtgctaaggaaggctgctcttctgtcactctgaagttgcttggagggatgtccccatgcagactctctcccagccctccactcagggaaggtctgtctgtacccactgccctctatagcagaaaacttgcactcctgaatgcttttttttttttttttttcaagaaagaagtggctgtggactcaactagattcttggtttgaaaaagccaaaacatattggtcactgattgtcacattgggttanaaatgtccattcatgatctcccttaagctgcacacaaccctatgaaataactaccattatctaccctattttgctaaagctcaaagagattaaataatgttgacagggatcctagccttgaactcactgaaggtgtta

SEQ ID NO: 792 - DNA, 427 bp, Homo sapiens
gtctttacaaaattcctgacaggtggttactgaatctctctatgaactttccattcaaaactttccaagtttttccttatgtggaaccgaaatctttctttctcccgtgaaactttactactatcagataattgaagacagatctctttgtattctcttcaagcccaaaccaattctgttccttcaatctaaatagtggtaatatgaatgtttaagaaatgaaataagaaacatgtgcaggcactttggaaggtgctaagtgactgccctaaggaatgaaaagcaagggccaggtgggagtagcccagcgaaggcacttgggctgccaggaacaggaggcgtgggaaactctggcttaggaaaacatgaacacaggggcaacagaggcaaactgttgttcgagttaaatataaatctcaggctcttt

SEQ ID NO: 793 - DNA, 253 bp, Homo sapiens
aaatccactagccatgctcaaaaaaaaatattcttcatgttttaattttatacaatggctagcaggcaccttagtaaccagccagaaatcaatttcaaccaccatcaacccctaaactacagtaccaggatggctggctaaagaaaggaaacggactggctgcagtctgacgcgtgcccagtacaaggtgtctggctgactttgtcctaaataaggctaacattagtgaactaagaacagcgtcacgtggtgg

SEQ ID NO: 794 - DNA, 373 bp, Homo sapiens
gtccctatgaattgtacgtttcagagaaattttttttcctatgtgcaacacgaagcttccagaaccataaaatatcccgtcgataaggaaagaaaatgtcgttgttgttgtttttctggaaactgcttgaaatcttgctgtactatagagctcagaaggacacagcccgtcctcccctgcctgcctgattccatggctgttgtgctgattccaatgctttcacgttggttcctggcgtgggaactgctctcctttgcagccccatttcccaagctctgttcaagttaaacttatgtaagctttccgtggcatgcggggcgcgcacccacgtccccgctgcgtaagactctgtatttggatgccaatccacagg

SEQ ID NO: 795 - DNA, 442 bp, Homo sapiens
aaaagtagttagcatttaatgaaactccctccatgtggcttcaagccaccaggacacaggcccccccaacactcttaatcttctcctcagctcttctgctgaagaatttggccttcacgatgacaggctgctttgggagctttccctttcccagaactttatagtagcccgatcgcaccacatcaatgatgggagcagccccagtcttgtttttagcagcattcacccgtgtctgttcactgaccaaagtccacaatttgtcaaggttgacagttgggcagaagctctggttcctctttaagtggtaatgcttcataccaactttcccaaagtagcctgggtggtatttgtcgaagttgatccggtggtgatgcagaccaccagcattaccgcggccgccggggtgcttccggtgcttgcctatgcggccgtggccgtggct

SEQ ID NO: 796 - DNA, 358 bp, Homo sapiens
  misc_feature 316: n = A,T,C or G
ccttgagcttgggccgggcactgaggcgccccacatatgctgagagcagggggaacgcatccaggcagccaggggctaggacctcatggatcagcagcaagtccagcaggttgtagtcagcgaaggagatctggtctcccacaatgaaggtcttgcctccctggttctgggacagcagggtctcaaaaggcttcagttgcccgggcagtgccttcacatagtcatccttgcccgcctcatagttggtgtagatgagggagatgtatttgcagcggaggtcctccacgccgtcattcaccatgtccaccagggctgnctcctgctggtccttcccatagagcccaagggtgcggcccag

SEQ ID NO: 797 - DNA, 83 bp, Homo sapiens
aaaattaaaattaaatcccctccctccagcacacaaaaaaaaaaaacacacaacattagaggaatgccaaaaatattctctat

SEQ ID NO: 798 - DNA, 399 bp, Homo sapiens
cggaaaatagcctttgccatcactgccattaagggtgtgggccgaagatatgctcatgtggtgttgaggaaagcagacattgacctcaccaagagggtgggagaactcactgaggatgaggtggaacgtgtgatcaccattatgcagaatccacgccagtacaagatcccagactggttcttgaacagacagaaggatgtaaaggatggaaaatacagccaggtcctagccaatggtctggacaacaagctccgtgaagacctggagcgactgaagaagattcgggcccatagagggctgcgtcacttctggggccttcgtgtccgaggccagcacaccaagaccactggccgccgtggccgcaccgtgggtgtgtccaagaagaaataagtctgtagg

SEQ ID NO: 799 - DNA, 67 bp, Homo sapiens
cctcccaagcccaggtggacaagtcagactatgacatggtggattatctgaatgagctaagggaaag

SEQ ID NO: 800 - DNA, 456 bp, Homo sapiens
  misc_feature 426, 427, 454, 456: n = A,T,C or G
cctacacgatttactgccaaaacagagtggagtacgagaaaagggtccgagcacaagccaagaagtttgcgccctcataagcagcgaccttgtggcatcgtcaaaaggaagggattggtttggcaagaacttgtttacaacatttttgcaaatctaaagttgctccatacaatgactagtcacctgggggggttgggcgggcgccatcttccattgccgccgcgggtgtgcggtctcgattcgctgaattgcccgtttccatacagggtctcttccttcggtcttttgtatttttgattgttatgtaaaactcgcttttattttaatattgatgtcagtatttcaactgctgtaaaattataaacttttatacttgggtaagtcccccaggggcgagttcctcgctctgggatgcaggcatgcttnntcaccgtgcagagctgcacttggcctnan

SEQ ID NO: 801 - DNA, 154 bp, Homo sapiens
ctggagacactttagaactctttccccatcctccaccatagtgcaaacttcacgcttctctgagcacctccaaggtatgcccttgaagtgaaacagaaaagggaagaaagggggctttttcttttccatttctgaccaaacagaggtctgaaat

SEQ ID NO: 802 - DNA, 446 bp, Homo sapiens
ccattaaaagttatttacaacagtgggagaaaaaaagacaagaagttgtttcacattacagacctccccccaccccaaagcctaatacttgcttaccaagtcaaaaaagagacacagttgattcacaggctggaggtttgaacttgagtaagacatttataaaaacctagacggggcagtgtcctccccagcccaggtgccactaggcacagcacaagagactaaaaacaacaggggaaggctggacactcaaggtttgggagtataagcaccccacttctggctcagggatttggggagtagggtaaacaaaacctacttggaaaagaattggggaagaaaaccaacaactgccttatgcaggggtggggacagggaaggaggtagggccagggacaggagcatttcacatcactaacctaacttgggaagctgtaagggaccat

SEQ ID NO: 803 - DNA, 573 bp, Homo sapiens
  misc_feature 514: n = A,T,C or G
ccacacagactcaccaagccacagacttgtcttccacaagcacgttcttaccttagccacgaagtgaccaagccacacgtactaaaggttgaactcaaagatatgtacagggtattaaacaaataccaaggggaacagttaacttcaatacaaggtcaaaatcagcaacaagttctacaatccagtgctgatatcagatacgagcttcaaggacaatttcttttcgaaggcttattccagtttcgtgaggctagcatgaggtgtgtgcatttgccaggggcaaatttctattctcaattaacccatgcagcaaatgctacgcatctgctgagtccgtttagaagcatttgcggtggacgatggaggggcccgactcgtcgtactcctgcttgctaatccacatctgctggaaggtggacagtgaggccaggatggagccaccgatccacaccgagtacttgcgctctgggggtgcgatgatcttgatcttcatggtgctgggcgccagggcggngatctccttctgcatcctgtcagcaatgcccggatacatggtggtgccgccagacagca

SEQ ID NO: 804 - DNA, 359 bp, Homo sapiens
ccttatttctcttgtcctttcgtacagggaggaatttgaagtagatagaaaccgacctggattactccggtctgaactcagatcacgtaggactttaatcgttgaacaaacgaacctttaatagcggctgcaccattgggatgtcctgatccaacatcgaggtcgtaaaccctattgttgatatggactctagaataggattgcgctgttatccctagggtaacttgttccgttggtcaagttattggatcaattgagtatagtagttcgctttgactggtgaagtcttagcatgtactgctcggaggttgggttctgctccgaggtcgccccaaccgaaatttttaatgcaggtttgg

SEQ ID NO: 805 - DNA, 410 bp, Homo sapiens
aaaatgttcatgtagaaaattaatgaactataggaatagctctaggagaacaaatgtgctttctgtaaaaaggcagaccagggatgtaatgtttttaatgtttcagaagcctaactttttacacagtggttacatttcacatttcactaatgttgatatttggctgatggttgagcagtttctgaaatacacatttagtgtatggaaatacaagacagctaaagggctgtttggttagcatctcatcttgcattctgatcaattggcaagaaagggagatttcaaaattatatttcttgatggtatcttttcaattaatgtatctgtaaaagtttctttgtaaatactatgtgttctggtgtgtcttaaaattccaaacaaaatgatccctgcatttcctgaagatgttt

SEQ ID NO: 806 - DNA, 522 bp, Homo sapiens
cctgctgggcttggcaacgagggactcggcctcggaggcgacccagaccacacagacactgggtcaaggagtaagcagaggataaacaactggaaggagagcaagcacaaagtcatcatggctttagcgtctgctcgtggaaaccaagataaagatgcccattttccaccaccaagcaagcagagcctgttgttttgtccaaaatcaaaactgcacatccacagagcagagatctcaaagattatgcgagaatgtcaggaagaaagtttctggaagagagctctgcctttttctcttgtaagcatgcttgtcacccagggactagtctaccaaggttatttggcagctaattctagatttggatcattgcccaaagttgcacttgctggtctcttgggatttggccttggaaaggtatcatacataggagtatgccagagtaaattccatttttttgaagatcagctccgtggggctggttttggtccacagcataacaggcactgcctccttacctgtgag

SEQ ID NO: 807 - DNA, 327 bp, Homo sapiens
ctgctgcccttagagcttgtggacaaatgtataggatcaagaattcacatcgtgatgaagagtgataaggaaattgttggtactcttctaggatttgatgactttgtcaatatggtactggaagatgtcactgagtttgaaatcacaccagaaggaagaaggattactaaattagatcagattttgctaaatggaaataatataacaatgctggttcctggaggagaaggacctgaagtgtgaatgagtttccttgacttacactagattttgttttggcttataatgacaagaaaatggaattttttttcccactttctaatgttt

SEQ ID NO: 808 - DNA, 188 bp, Homo sapiens
cgagcggccgcccggcaggtccttatccctgtaagtctattaaatgtaaataatacatactttacaacttctcttagtcggcccttggcagattaaatctttgcaaaattccatatgtgctattgaaaaatgaaataaaacctcagatgtctgaattcttatttcaaatacagttatataattatttt

SEQ ID NO: 809 - DNA, 416 bp, Homo sapiens
ctggcaggacctgaaggatcacatgcgagaagctggggatgtctgttatgctgatgtgcagaaggatggagtggggatggtcgagtatctcagaaaagaagacatggaatatgccctgcgtaaactggatgacaccaaattccgctctcatgagggtgaaacttcctacatccgagtttatcctgagagaagcaccagctatggctactcacggtctcggtctgggtcaaggggccgtgactctccataccaaagcaggggttccccacactacttctctcctttcaggccctactgagacaggtgatgggaattttttctttattttttaggttaactgagctgctttgtgctcagaatctacattccagattgaggatttagtgtcttaggaaatttttttaattttttttttt

SEQ ID NO: 810 - DNA, 539 bp, Homo sapiens
ccactctttcatggtggtggcagcagttaccagtaatgagcattagactctgggggatagaacacgggctgccctgagagcttcatgttggagctgaagttcaaggttcacttcctttgggtttgtacttgacccttcttcatgtgtctctcccgttccctctaaaacaagtgtgtttcccctcatttttgaggctgtcaatggtgtgagagccaggatcatcacggggcctgaggttttactccagaaaagcagaggagtggcaaccttggcttggggtttggcagcccaggaaaggcagggaggagagctcaaagccggtttcatgtttcacccaaggtctaattgtgggagaggacaaatccagatcccctgtttgacagaattagttcacaaatgtctcttggcaaaaacatgtgacacctaaccatgataattgacttaatccaagaaagagctctgtagggcagagcaataggaaatctctctttcgttatggaaaaaaaataatccctctacatagaaactgagtgacatgt

SEQ ID NO: 811 - DNA, 454 bp, Homo sapiens; identical to SEQ ID NO: 87

SEQ ID NO: 812 - DNA, 517 bp, Homo sapiens
  misc_feature 510: n = A,T,C or G
cgctcctgaaggagaagaggaagcgacgcgaggagctgttcatcgaacagaagaaaagaaaactccttccagacactattttggagaagttaaccacagcttcacagactaacatcaagaaatcgccaggaaaggtgaaagaagttaatttgcaaaagaaaaatgaagactgtgaaaaaggaaatgactccaagaaagttaaagtacaaaaagtacagtctgtcagccagaataaaagctacttggccgtaaggctaaaagaccaagatctgagagattcaaggcaacaagcagcacaagccttcatacataattcattatatgggccaggaaccaacaggactactgtaaataagttcctgtctcttgccaacaagaggttaccagtgaaaagagctgctgtccagtttttgaataatgcttggggaatccaaaaaaaacaaaatgccaagaggtttaaaagacggtggatggtcagaaagatgaaaactaagaagtaaatcaatgctnaatgaag

SEQ ID NO: 813 - DNA, 254 bp, Homo sapiens
ctgtttttacatctaaagcaatagactagaactgaattatcttctacatagtaaaatcacaattgtggaattacaggaattctggtgatattaaggtgaaataacaaaacacaaaaggccctattttaacagttgatgtgacagtaagttttaatagaacctgtaacttcattttggaaatgcttctccaccaaataagggctttttcccctatttaaggagccagatggattgaaagatgtggaaataggcag

SEQ ID NO: 814 - DNA, 460 bp, Homo sapiens
  misc_feature 395, 405, 437, 455: n = A,T,C or G
cctattggttatcaaatggggcacagtgtagctgcctcttaaaaagttgtgaggaatgagttagaactggatctgaagtcctcaggtaataggcatggctatgactgggtgactttaagcattgttgcttctcaacttgctttgtatcctcagcagtcaaaccaggtgctcttggctccattcagactcttgggttctgctcttgaccattttgcaaagagttctgaaccttcatgggcaaggtcaagcaccctgtgactgggggagaacctttgaacctggagtgtgggcctgggttcgccccggatccctgtccattgcttgctgtgggccttggtttctttatctgtaaaatggaggtaatgcctggattacaaggctgctataaggatganaggggacaantgagggtactttttaatgaaagcattcttgtnaccaccagggaaccatantcagg

SEQ ID NO: 815 - DNA, 295 bp, Homo sapiens
ccagtattcctggaggatataacactgacatcagcagggttttcaatggcaacaattgcacgagctgccagcagaagcttctcccaggtcctcttgagatttatgatatagatgccatcacttttccttttatagatgtactgttccatctggaagtcaagattggtgccacctaagtgggttcctgctgcaaggaacttaaggacatcctcctccttcatttgcaggacatcaagggctccggacattgtgaaaatttccctttaagttacgacgggaatccagaacaacgccg

SEQ ID NO: 816 - DNA, 96 bp, Homo sapiens
cctaggattgtgggggcaatgaatgaagcgaacagattttcgttcattttggttctcagggtttgttataattttttatttttatgggctttggtg

SEQ ID NO: 817 - DNA, 444 bp, Homo sapiens
tttttttttttttttaagaccctcatcaatagatggagacatacagaaatagtcaaaccacatctacaaaatgccagtatcaggcggcggcttcgaagccaaagtgatgtttggatgtaaagtgaaatattagttggcggatgaagcagatagtgaggaaagttgagccaataatgacgtgaagtccgtggaagcctgtggctacaaaaaatgttgagccgtagatgccgtcggaaatggtgaagggagactcgaagtactctgaggcttgtaggagggtaaaatagagacccagtaaaattgtaataagcagtgcttgaattatttggtttcggttgttttctattagactatggtgagctcaggtgattgatactcctgatgcgagtaatacggatgtgtttaggagtgggacttctaggggatttagcggggtgatgcctg

SEQ ID NO: 818 - DNA, 481 bp, Homo sapiens
aaaaagcaatcctcaaactctctagccacagcagtaattaagattaaggtctgtcagtgggctgatcccctccaggtagcctccctcactccaagagaagatgtagagaaatatggatgacacatgcttgcattgtttttgtgtcaaaacacacacacccacacacacacacaatataaggcagcccaaaggtctgtggcagaaaacactgcaaatgactcagtgatacactacatttgcaatctctcatttatacaaaaaaagaaacaagtttccagtttgttttcaacaaaaacaacaaagaaaaaagggatggacaaaaaggcatttatacaaatctagggtgaggaatacaaagaaacttgcttttaataataaaaaaagattaaagagataaataaaaaaaaactggttacagttaagaacataatttaacaacagatggccataccctttgaggaaagctccaacaacctatttt

SEQ ID NO: 819 - DNA, 317 bp, Homo sapiens
ctgggcacagtccagttctcagcagtaatgacagaaatgaaggaaggaagctcagaatgagtgcacgggggaaatgggttttgctgatgcatttccagggccggccgtactctttgttttggcacacttttcctgacaaacagccagtgttctcaacacataaatactagtccacgttaacaacaatagcatatgagaccgctctccgtaaagatgccagattggatgcaaatggactggaaataccttggagggtttcacaaaaataagacaaagggcaaaggaactttgccaaaggagatggagagcaattcttt

SEQ ID NO: 820 - DNA, 412 bp, Homo sapiens
  misc_feature 160, 272, 326, 352, 381: n = A,T,C or G
caagctttttttttttttttttttttttttttttggttaaaaaagtttaatgagctgtaaaataaatacacttccattaaatattaaataaattatttacaacttgaaaaaatactttttaccttcgtgcacctttatatacagaaatagcataaaaagngacaattgaaagtttaaaaccatcataacaaaaagggtccattgtcttatgatccactggaaagaggaccgactcatcatttatggctatgacttggcagtgactccaatgngatatcctgtaattttatcttcagttatgctatagcatgtacatttccattctnttgtcgaagtttctttcgttcctcancttctccttcatatttcctgacgtattgncttctaagctggactgtaataacagcaacag

SEQ ID NO: 821 - DNA, 226 bp, Homo sapiens
  misc_feature 185, 186, 194, 195: n = A,T,C or G
cctcggtggacatcaggcgcaggaaggtcagccaagaggaatcagaaacctgaagttagaaaggctcaacgagaacaagctatcagggctgctaaggaagcaaaaaaggctaagcaagcatctaaaaagactgcaatggctgctgctaaggcacctacaaaggcagcacctaagcaaaagattgnnaagcctgnnaaagtttcagctccccgagttggtggaaaac

SEQ ID NO: 822 - DNA, 552 bp, Homo sapiens
aaacaaattgcagagaatagagaaaaaaataggttatttacagaaaacaatatctacatatgtacttagaggtacaaatttggtgacagaaaagacttcagtatatgctggcatcttagaagcagttctcaaagagcttagttttattttcttgaattttaagaatgcctaagatccttcttcatcctcgatcttgggagccaagtagtattttaagtgtcccatatccgcaattttatactctacaacaaggggtacatctgcagacatactgagtgtcaccgttgaagagagtggagtggcttttgtaaagaagttcaggtacctcagtgcaaaagttagttgaactggttcattcatctctatggtaacagcttcctcctcttatcgacattacttgtctgtgacaatttaatgtttccatttccaagttctccacttgcagaaaatttcactccgtcttttgcacaggaaattacaacagcatctccaatatggctgagatctcggcatatacgtgcaaattcaccagaaggcatctttactacacag

SEQ ID NO: 823 - DNA, 263 bp, Homo sapiens
  misc_feature 49, 151: n = A,T,C or G
aaattgaagcgaattaaataggattttactactcaacattcattatacntgttaatctttgctgaaatatatgctaacaaatgttaagcaagggaaactgaagacttagtcatgtggattgttagcagtgatctgcattctgtaaaagagntactttcccatgatgtaggcatgaagtggtaccagtaagcgtacagcggaaatgttgactttagttaacattgggtttagcatttccagtgcagcattatcagtgggccttt

SEQ ID NO: 824 - DNA, 328 bp, Homo sapiens
aaaattagtcatcttacaacacaacagtattctagcacggtggcgaagtgacaggcggcagatacgggggaggaaggagacgttcacgggaaattccacattctactctatgtgaactgctccagaaaaatacagacatgatttcacagtaggattcccagagtaaatgatgatacataggacaactgacctcctctaagaagcccggctggggcagcagtgagcttttcatggagccacgcagactggcccggaagcaacacccaggttcaacatttaagagcactcgctataacattctttttggacgcaggtggtggaaaagttt

SEQ ID NO: 825 - DNA, 509 bp, Homo sapiens
ccacacaagtttcgaagacctactcccaaggaaaccaaggacacaatgaccttcaagacacagacagccaggaacagggcacggattgctgtgaacaacttcctcagcatctgcatgtaagctctacactcctccttctgccattggttctcttgacttcgccgcatccatctgtacccagtggtagggaagacagggtctgagcgatcacacacagtgtcgatgtataaaaagggttcagtttgccagatgaagctattcacgcagaggacaacagcagccatagctgtagcaaagcctgtcagggtgagcaggctggatatatagccagcaagtttgcccgggtgcttctcatggacaatggccccagctcctgctgcgatcaccacagaccccgcccagaaggcacagcctgaggcacgcagcacagtccagggccccaagctgagacacactccaagaacacaactcacaacccccagcaatatctgagtcacccctagagccag

SEQ ID NO: 826 - DNA, 442 bp, Homo sapiens
ctgtaacagggctgccttcactccggcatgagggtcagttaatgaagaactggtggtgggtacatgctggttttctgtccgataatctagatcttcctcagtgactggtggtggttcaggaggctcgggaggtcgttggtcaggaggcagaattcgaggccggtctggttctggcgttagctccaagatcctcatatcttgatgctggatgaggtcatcttgtcccgacaccggaatgctaggttctggaggtggcctgagttgtaatgacgcttcatgtcccgatccattttccctctcttctagtagcacatctttctgctttgactgctgagcctttattaactgagtcaacagaactgcaaatgcactctgcacagccgcctgggcagcatcagtctccactttaggctggatggtctgagaagaaggctgaattcct

SEQ ID NO: 827 - DNA, 605 bp, Homo sapiens
ccagggtttataattgggatgtaaaaagaagaaacaaggatgactctaccaagaacaaagcataatgctggcaattaaaaatgtggtttagttttccaaacatgttatcttaaatacccctttatccttacaggttgacataactttgaatgttttaacagcaagaattttaagaaaagataaacaccattttatttatttataaaaacaaaattagtttcaaatatttttgacattgtgatttttttttccacatttctcagcaaagctaatggtattttaatcattatttttgcctgtcataagaaaactcttagctgaaatggccgaaaactgtgagacatgctatggaagctgaatgccggacgctagcacagtttactttttccctttctaattggctgatgttactctcacttgatgtggttaaaccattttagaggtagagaagacagacagtttgaatatttgtaaacttgtttttctttggtatatttaggacttagtggtcctctgttgctattgtcttctataagtggagtttcatgacttactgcttaacgaataactaactactatgatattctggacattttaggaaatgg

SEQ ID NO: 828 - DNA, 475 bp, Homo sapiens
ccactagaggtctgtgtgccattgcccaggcagagtctctgcgttacaaactcctaggagggcttgctgtgcggagggcctgctatggtgtgctgcggttcatcatggagagtggggccaaaggctgcgaggttgtggtgtctgggaaactccgaggacagagggctaaatccatgaagtttgtggatggcctgatgatccacagcggagaccctgttaactactacgttgacactgctgtgcgccacgtgttgctcagacagggtgtgctgggcatcaaggtgaagatcatgctgccctgggacccaactggtaagattggccctaagaagcccctgcctgaccacgtgagcattgtggaacccaaagatgagatactgcccaccacccccatctcagaacagaagggtgggaagccagagccgcctgccatgccccagtcagtccccacagcataacagggtctccttggcag

SEQ ID NO: 829 - DNA, 361 bp, Homo sapiens
caggtcccggccgggcccatcctctccatccgggtctgcagggacatgatcacccgccgctccttgggctacgcgtatgtgaacttccagcagccggcggacgcggagcgtgctttggacaccatgaattttgatgttataaagggcaagccagtacgcatcatgtggtctcagcgtgatccatcacttcgcaaaagtggagtaggcaacatattcattaaaaatctggacaaatccattgataataaagcactgtatgatacattttctgcttttggtaacatcctttcatgtaaggtggtttgtgatgaaaatggttccaagggctatggatttgtacactttgagacgcaggaagcag

SEQ ID NO: 830 - DNA, 535 bp, Homo sapiens
aaaaaaaacctaattcattgaagtaataaccaaataattttcaatcttgattcaactgtgattcaaatcttacaccatttgcccacttctatgaattttatgtataaaattttttaagagtcagagtttttttttcttgattaattggatgtatttcacagaatttccaactgctcacgttagttttcttccttttagagttgatctctctaatgtattagatcctcatgcctttgatagtctctctggaataagtttgcagaaaaaacttcagcatgtgccaggaacacaacctcaccttgatcagaatctcctgtgggaaaagaatgtgagaaacaaggacaatcactgcatggaggtcataaggctgaagggattggtgtcaatcaaaggcaaatcacaacaagtgattgtccagggtgtccatgagctctatgatctggaggagactccagtgagctggagggatgacactgagagaacaaattgattggtcctcattggcagaaatttagataaggatatccttaaacag

SEQ ID NO: 831 - DNA, 491 bp, Homo sapiens
  misc_feature 486: n = A,T,C or G
ccatcttccacaagtactccggcagggagggtgacaagcacaccctgagcaagaaggagctgaaggagctgatccagaaggagctcaccattggctcggtgagtggcctcctccccaggaccccttttcccacccttgtcctttggaagcaggattaggggagagagaggtgccaggtgcatctgactcacatttacccacattctgaggccctggtccacatgtagaccctgagctgtagacccactctcccagcgggtaggggatgcttccagccggatatccatctctccaaatgaggaccagtaactgagaagtagctgaggagaagcaatgccaaagtgacatgggtccttggtgatgagggagcacagagccacttgcagagaggattgcctgggagggggaaggggaagaatccagggttgtcatcaccactgagtatggatttcacattctaacacattagaagctgcaggatgctgnaattg

SEQ ID NO: 832 - DNA, 311 bp, Homo sapiens
  misc_feature 121, 280, 290, 295: n = A,T,C or G
ccaccaatggtactgaacctacgagtacaccgactacggcggactaatcttcaactcctacatacttcccccattattcctagaaccaggcgacctgcgactccttgacgttgacaatctngtagtactcccgattgaagcccccattcgtataataattacatcacaagacgtcttgcactcatgggctgtccccacattaggcttaaaaacagatgcaattcccggacgtctaaaccaaaccactttcaccgctacacgaccgggggtatactacggncaatgctctnaaatntgtggagcaaaccaca

SEQ ID NO: 833 - DNA, 162 bp, Homo sapiens
ccagcagcctctgatctgtgcaaggtattaacgtgtcagggctgagtgttctgggatttctctagaggctggcaagaaccagttgttttgtcttgcgggtctgtcagggttggaaagtccaagccgtaggacccagtttcctttcttagctgatgtctttgg

SEQ ID NO: 834 - DNA, 502 bp, Homo sapiens
cctctactcaataatagtttacattactcttaacaaaatcattctacataaacagatagctccttaaaaatagtactctctcattaaatctaatttgacagaaagaagtttaagggaaaaaggagtgctttgtaagtgaaaaagtacaaatctttggcctttctcttgacattttcgtatgtcaaaaagcaaaaaaccttcatgtatttcaatctagtgattactttttgcaccataatttgttttttacaccacaaaaggaggcactttcagtatctgtaaaaggtatttaatcctaaaacatacttacctagagaataattaaaacagaattcaatacaatctagtatctattaggaaattaagagttatcacttctaaaagtcatttgaaagtcaatgatgttatctggtcaatggcaggaaatgggaactggaacaaatataagaacttatgggatttcctacacggagacaaaaaaagatattcctttatgttgttt

SEQ ID NO: 835 - DNA, 305 bp, Homo sapiens
cctaaatgtgaccaaaccaacattgtaatccagtcccttcttggaacctaaattgaactgccaagtactgcgcatgcaagagaccctttattggccttacagtgggccattcatttctataggcaaagaaagctctagacagattggaataggaaatggatatttgccttttagctacacccctttgtctgtcttcctcattttgttccttttttttttccctaaaggggagtcaagttccctgggttgttcccctcataaggtattagggacttgtgtcacatctctctggagttttctatttt

SEQ ID NO: 836 - DNA, 316 bp, Homo sapiens
atcaacctctgcggctcccactgcggcgtttccatcggggaagacgggccctcccagatggccctagaagatctggctatgtttcggtcagtccccacatcaactgtcttttacccaagtgatggcgttgctacagagaaggcagtggaactagccgccaatacaaagggtatctgcttcatccggaccagccgcccagaaaatgccatcatctataacaacaatgaggacttccaggtcggacaagccaaggtggtcctgaagagcaaggatgaccaggtgaccgttatcggggctggggtgaccctgcacgagg

SEQ ID NO: 837 - DNA, 335 bp, Homo sapiens
ctggcttcagagccggcctgacctgtaccttaatcttgtggctgtgcgcagggacttctgtgggaggccccggttcctgcatatccggaggtctgggccatagcatggctgccctgtggatgccttgtcagtgccgccagcctgaccagaggggaggtggatggcactttccagagcccaggttcttatggcatttcccagggttctgtgatttccccatgctctgcatttctaggatatttctaggacacctggattggctccatcacatcagagtggctgagggcagttgctctgtgttggtgaaattgctgtgggggtatcgggggatatgg

SEQ ID NO: 838 - DNA, 446 bp, Homo sapiens
  misc_feature 362: n = A,T,C or G
cctgacattcctgccttcttatattaataagacaaataaaacaaaatagtgttgaagtgttggggcagcgaaaatttttggggggtggtatggagagataatgggcgatgtttctcagggctgcttcaagcgggattaggggcggcgtgggagcctagagtgggagagattaagctgaagggaggtcttgtggtaaggggtgatatcatggggatgttagaagaaacatttgtcgtatagaatgattggtgatggcctggatacggttttggatgatttgagaagctaaatggaagatacaaggtccgaataaaaggaggagaaaaatgggtattaaatgtctaagaattgggaggacctangacatctgattagagagtgcctaaggagattcagcatagtcctgccagcaaagattatttacttcaagagttaagagtggcagt

SEQ ID NO: 839 - DNA, 479 bp, Homo sapiens
ctggtctttaattatgtggttccgaagcaaattccttgtatgggcatcaattggaggggttccatctttgaatacagaattcaggggagccaggagggtcaaccgctcacttccagagagatgattgccgaggccggcttgtctgaaaaggtcaatggctgtggacacatcagactctgcagccaattcaaatagtgtcttggctgagtctgggatgagtagctcatcaatgtagtggatcaccccgttggtggctaggatatctttattggagatgatcgccttcccgttgatagtgagcatgtccccgctgcagcccacctccagtgtcgtgccctccagggtctctacagacagccccgcaacgatggcttcagcacacatagctgacttcaagatgtggttgttcagcaggtctctcagggcttctgggtcgcccaggatacggttcaaagtctcactagggatcttctcgaagg

SEQ ID NO: 840 - DNA, 409 bp, Homo sapiens
ctgtccaatggcaacaggaccctcactctattcaatgtcacaagaaatgacgcaagagcctatgtatgtggaatccagaactcagtgagtgcaaaccgcagtgacccagtcaccctggatgtcctctatgggccggacacccccatcatttcccccccagactcgtcttacctttcgggagcgaacctcaacctctcctgccactcggcctctaacccatccccgcagtattcttggcgtatcaatgggataccgcagcaacacacacaagttctctttatcgccaaaatcacgccaaataataacgggacctatgcctgttttgtctctaacttggctactggccgcaataattccatagtcaagagcatcacagtctctgcatctggaacttctcctggtctctcag

SEQ ID NO: 841 - DNA, 322 bp, Homo sapiens; identical to SEQ ID NO: 755

SEQ ID NO: 842 - DNA, 402 bp, Homo sapiens
ggcattcctgttacagaccaaggagaactggagaaagaaagagaaaatcagttcgtggttgcattgtggatgcaaatctgagcgttctcaacttggttattgtaaaaaaaggagagaaggatattcctggactgactgatactacagtgcctcgccgcctgggccccaaaagagctagcagaatccgcaaacttttcaatctctctaaagaagatgatgtccgccagtatgttgtaagaaagcccttaaataaagaaggtaagaaacctaggaccaaagcacccaagattcagcgtcttgttactccacgtgtcctgcagcacaaacggcggcgtattgctctgaagaagcagcgtaccaagaaaaataaagaagaggctgcagaatatgctaaacttttgg

SEQ ID NO: 843 - DNA, 486 bp, Homo sapiens
ccacctggagacggtgattttgggcctattgaagacacctgctcagtatgacgcttctgagctaaaagcttccatgaaggggctgggaaccgacgaggactctctcattgagatcatctgctccagaaccaaccaggagctgcaggaaattaacagagtctacaaggaaatgtacaagactgatctggagaaggacattatttcggacacatctggtgacttccgcaagctgatggttgccctggcaaagggtagaagagcagaggatggctctgtcattgattatgaactgattgaccaagatgctcgggatctctatgacgctggagtgaagaggaaaggaactgatgttcccaagtggatcagcatcatgaccgagcggagcgtgccccacctccagaaagtatttgataggtacaagagttacagcccttatgacatgttggaaagcatcaggaaagaggttaaaggagacctggaaaatgc

SEQ ID NO: 844 - DNA, 541 bp, Homo sapiens
aaaaacccagtgagtattattttcaatttgttaaggttgcaaaccttcagtgaagcttgtttctcttttcttgttccttctttcaaattgaaatgacatttttgtttatagagctccaggtcaaaggatctaacaatttttaatagcaatttcctatagtgaatacttgctttttcttcctagtcttgcagcaaaaaactaagcaagctttgacatagagggacgcatgtgaatatcgtaaatttatacacaaactcccataaatactccctttcaatctaacacagaagacggggcaggacggacgcagcagttggggcgtcggaagttctgcagcatggactggaaaacactgtgctgccttcctctgagcttcttatttgaagaagtatctgaggaaatggatctccgggtctggctattttgagttttgattaatttctcatgttccctgatttgtctttgcaaatggttctggatcgcgattcccagggactctgcgtccaaggatgcaccatacacttcccaggtcattccctgc

SEQ ID NO: 845 - DNA, 337 bp, Homo sapiens
gcaccgccagccttgtgggcagcaacatgttccccaatcattaccgcgaggcggcctttgggggcggcctcctatccccggggcctgaagccacgtagccccgcgatgccagaggaggggcactgggtggggagggaggtggaggagccgtgcaatcccaaccaggatgtctagcacccccatccccttggcccttcctcatgcttctgaagtggacatattcagccttggcgagaagctccgttgcacgggtttccccttgagcccattttacagatgaggaaactgagtccggagaggaaaagggacatggctcccgtgcactagcttgttacag

SEQ ID NO: 846 - DNA, 454 bp, Homo sapiens
ccacagctaacatcattgcagcacctttactccttcggctgtgatccaatctccagctcacttctttttgccagcaccaacattggcctttgcagtccccctgactttcttcattctgttcttgcgttcctttcgttgctttcttgaggtctttttcttctcatacaggccatgtcttgcaagtctatgtttgggttcatttttctttgcataatccagggaatcataaatcatgccaaagccagttgtcttgccaccaccaaaatgagttctgaatccaaatacaaagatgacatccggtgtggtcttgtacattttggctagtttttcccgaatttctgtcttaggcactgtcgccttcccggggtgaaggacatcaatgaccatttgtttcctctgaagtagtcggttggtcatgaactttctagtgcggatagttacggtgtcgttcatg

SEQ ID NO: 847 - DNA, 369 bp, Homo sapiens
ccaacctgcctctacagcgtccacagcgaacacagggctagacaagggaggagtttctcaaacggttttaatcggttctctccgcgtcacaagccatcgggtaaggcaacggaatgtgcgtggggtcccctgtggctccgcggtcacaatactgagcctggaattgctgttagcaaaatatacatttgtgtcaccataaaaaaccgcgccgccgcccctcgggtctcacaacaggtataaaaaattataaatatttacacccttgttacacgcttttacggaaaggggatcctaggagagcccccgggacaggacgcgggggcggtagaaagagcacaaagacaggagcgcccgccttccgggtcccag

SEQ ID NO: 848 - DNA, 344 bp, Homo sapiens
ccaacttaaagccgaatcccggctccaagaaaccggagagaagaccaagaggtcggagaagaggtagaaaatgtggcagaggccataaaggagaaaggcaaagaggaacccggccccgcttgggctttgagggaggccagactccattttacatccgaatcccaaaatacgggtttaacgaaggacatagtttcagacgccagtataagcctttgagtctcaatagactgcagtatcttattgatttgggtcgtgttgatcctagtcaacctattgacttaacccagcttgtcaatgggagaggtgtgaccatccagccacttaaaagggattatggtgtccag

SEQ ID NO: 849 - DNA, 245 bp, Homo sapiens
ctgcttgggcctctctcctctggagagtcccacctgtgtagtgggcgtgggtgccctgattgggcccagttgcaggcagtagaggcagggcagggaccttgcagtccactacatgttcctcgggatttccccaggagccacagtaggagggaagtgtggtttacctggcctttgattctctccaggtgaggaagaggatggagatgaagatgaggaagctgagtcagctacgggcaagcgggcag

SEQ ID NO: 850 - DNA, 294 bp, Homo sapiens; identical to SEQ ID NO: 292

SEQ ID NO: 851 - DNA, 362 bp, Homo sapiens
ccatcctgaggatagggcagagtgcccagggtggccccagggcttctaaaaccccacctagaccaccctccatgtcaggtactgagcaaggccccagatccttctctctggaggaagagggaagcccaggggtcctgtttgtaaaacaacggtggcaacagctcctcttccagagctgtctctgcctttatcctgggagatggggaggaagccccatctctgctgttccccgcgtggaggaagcccacccagcaagctctctcctaccccaggtaaaaggtgctcctttgcctgggtttgaattccagcgctgccacttcctctctgcacctcctggcaagtttcttctattccccacgttt

SEQ ID NO: 852 - DNA, 311 bp, Homo sapiens
  misc_feature 109, 124, 241, 250: n = A,T,C or G
aaaagataatatattctaccctcatatggtcctcagaattaaagcataatgaacaggaagaaaaaggaaaagaatgcaacctgagtgctaaggcagaacatcttgccanaagtaattaatgaangtagagtatataatgaaaagtgcagaatttcatagggccaacaagataacagtctatatttttcacttacacaggcaaagtggattctgcaattaccagttgcgttaaatgcaccanataaagctnctaaaattgatactataaggcgccaccttaagtttttccaggctgcaactgtgcattattt

SEQ ID NO: 853 - DNA, 490 bp, Homo sapiens
ctgttatccaggcgctggatggggaaatgcgcaacgcagtgtgcatattttatctggttctccgagctctggacacactggaagatgacatgaccatcagtgtggaaaagaaggtcccgctgttacacaactttcactctttcctttaccaaccagactggcggttcatggagagcaaggagaaggatcgccaggtgctggaggacttcccaacgatctcccttgagtttagaaatctggctgagaaataccaaacagtgattgccgacatttgccggagaatgggcattgggatggcagagtttttggataagcatgtgacctctgaacaggagtgggacaagtactgccactatgttgctgggctggtcggaattggcctttcccgtcttttctcagcctcagagtttgaagaccccttagttggtgaagatacagaacgtgccaactctatgggcctgtttctgcagaaacaaacatcatccgtgac

SEQ ID NO: 854 - DNA, 366 bp, Homo sapiens
aaaaactgccacttggagataaaaatcaagggcacaatgtactcagagagtattgagctatctggtatcccaaatgatgtgaatactttcagaaaccaatggcaaattgaacccacgtttcccagctatggagatattaatacattgattcaaatcccattactcaatccacatagccctgaggtcatcctgcaaagtgcgtatcaaaaaatacgaagttagggtgacaaagtttgacagtgatgttatacaagtcaaacttggaaggtcatagtaagcatacctatgctgagagaaaagcatcaaatcctttgtgtacacatttagttttattgtaacaaagcaacttgtacacttttaacgttt

SEQ ID NO: 855 - DNA, 434 bp, Homo sapiens
ccaacatggtgaaaccctgtctcttctagaagcacaaaaatgagctgggtgttctggtgggcacctgtaatcccagctacttgggaggcttaggcaggagaatcactggaacccaggaggcggaggttccagtgagccaagatcgcaccactacactccagcctaggccacaaagcaagactgtttctcaacaacaacaacaaaaaaaaaaaaaaaaaagagactcagagagccagggaccagggaaggatatgaggaagtgttctgaggacagagaaatgggagaatggggaggagaaggagcggcacatggagctcagcagaggagacagacagaaggaaagatggcttggagaagccggcagtctgcgaggctgaggaggatggagagtggtttggggttttgggtcgggctctagtgtgatcaactgcag

SEQ ID NO: 856 - DNA, 283 bp, Homo sapiens
ctgctgctattaagttgcaagctctacagctagctacatgactgatggatcagtttgagatttgttcccttgtcaaaagtttaactctgatagaaggttggcctcacattctgatgtttggacatcccttagctaggatatgtctggtcgaacagacctttgtggcaagccagatgtcctatcacctcgctagcggtaagagggcctctttgagctctgtccacctagtcaggttggagacaccaggggatctaccaccaaaagctcccttctagtagtacag

SEQ ID NO: 857 - DNA, 149 bp, Homo sapiens
ccatattgacagaccaatctatgggactaggggaattggcatcaagtcgacacccttgaacctgctatggccttcagcagtcaccatcatccagaccccccgggcctcagtttcctcaatcatagaagaagaccaatagacaagatcag

SEQ ID NO: 858 - DNA, 301 bp, Homo sapiens
  misc_feature 246, 268, 297: n = A,T,C or G
ctggaggatggccgcactctctcagactacaacatccagaaagagtccaccctgcacctggtgttgcgcctgcgaggtggcattattgagccttctctccgccagcttgcccagaaatacaactgcgacaagatgatctgccgcaagtgctatgctcgccttcaccctcgtgctgtcaactgccgcaagaagaagtgtggtcacaccaacaacctgcgtcccaagaagaaggtcaaataaggttgntctttccttgaagggcagcctnctgcccaggccccgtggccctggagcctnaata

SEQ ID NO: 859 - DNA, 485 bp, Homo sapiens
ctcgtgagacaggatgcccaggacctgtatgaggctggagagaagaaatgggggacagatgaggtgaaatttctaactgttctctgttcccggaaccgaaatcacctgttgcatgtgtttgatgaatacaaaaggatatcacagaaggatattgaacagagtattaaatctgaaacatctggtagctttgaagatgctctgctggctatagtaaagtgcatgaggaacaaatctgcatattttgctgaaaagctctataaatcgatgaagggcttgggcaccgatgataacaccctcatcagagtgatggtttctcgagcagaaattgacatgttggatatccgggcacacttcaagagactctatggaaagtctctgtactcgttcatcaagggtgacacatctggagactacaggaaagtactgcttgttctctgtggaggagatgattaaaataaaaatcccagaaggacaggaggattctc

SEQ ID NO: 860 - DNA, 501 bp, Homo sapiens
ctgagccactgcccctggctgacgctgcctctttgaagtgcttgtcttccctgctactctggggtctgctgcccgctggctgctcccaggtgttctttgccagatccccaccaaacttcatgcctccaaggcttgagggtgcccgggctcagtatttccaggttactgatccagcaaaattataagaaacattaaaattctctgaaaatttcagttttttcccttttttcaaagagaaaaacaattataggagacttctcctggcttcacagtttctggatgctgtgtttttgttaactgtaacactttgaaatagcatttgctaaaaaccttttttctttctctcttttttggtgatgtggcagagagaaagacattgagatgttccttgagtccagccgcagcaaatttataggttacactctaggcagtgacacgaacacagtggtggggctgcccaggccaatccacgaaagcatcaagactctgaaacaggtgagt

SEQ ID NO: 861 - DNA, 365 bp, Homo sapiens
ctgaggaagaaatgaaaaaagaccctgtcccccatggcccgcccactggcctcctgtgaactctgtcctgttgccaaccccagatgaagtcagccaaaaagtgctttccacatcctctctctggggctgcccagcctgaccgcaggggatccactggcagagccaaggtggatgctggtgcctgaagctggaagccagcaggacatgagacccctcctgtagcaggaagtggttctagaactcccagcagaacagaacggaaaaggagctgattggggatagaatgagttctgctaaacagccagatgctctgagagaggtgacactggactgtctcggaggtgtgtgcagatggctacaggtgg

SEQ ID NO: 862 - DNA, 617 bp, Homo sapiens
ctgcaaagtaccacacatagcagaaagacagaaatttatactggggggttggaagatatggctactgagtctgtaattccatttggaggttcaaaaaaccatttttacattgctattatttgtacagaccaagggacctaaattttgaaacagctagacagtgatataaacaaacatttatctctgggggtagaaaattaattataatacaagaatgaaaatgggcaaacagtatggaaggcacccacacctcctagcaccctttggttttctgatggagttctcacttcacacatcagtgcattggattgcagaaaatattgatattttatttcatcaaaagtgccatttggtatgccactattgaaagcttatcgctgtctttttctccttcagcaagtagaggtcaatgaagcagggtgtgttagttacgcaaattcctataaggcactttacggttttcatattggacagtgaggtacacaggatatatttctagggttcgttgctgttaacaaaaagaagaagaagtagcaccatgttgtgacattagctgagtcaggcttcattatgttcttctcatacagacttggcagcggctgacgtgcgtgcgcagc

SEQ ID NO: 863 - DNA, 520 bp, Homo sapiens
ctggggccactgtcggcatcatgattggagtgctggttggggttgctctgatatagcagccctggtgtagtttcttcatttcaggaagactgacagttgttttgcttcttccttaaagcatttgcaacagctacagtctaaaattgcttctttaccaaggatatttacagaaaagactctgaccagagatcgagaccatcctagccaacatcgtgaaaccccatctctactaaaaatacaaaaatgagctgggcttggtggcgcacacctgtagtcccagttactcgggaggctgaggcaggagaatcgcttgaacccgggaggtggagattgcagtgagcccagatcgcaccactgcactccagtctggcaacagagcaagactccatctcaaaaagaaaagaaaagaagactctgacctgtactcttggatacaagtttctgataccactgcactgtctgagaatttccaaaactttaatgaactaactgacagcttcatgaaactgtccaccaagat

SEQ ID NO: 864 - DNA, 449 bp, Homo sapiens
ccattaaaagttatttacaacagtgggagaaaaaaagacaagaagttgtttcacattacagacctccccccaccccaaagcctaatacttgcttaccaagtcaaaaaagagacgcagttgattcacaggctggaggtttgaacttgagtaagacatttataaaaacctagacggggcagtgtcctccccagcccaggtgccactaggcacagcacaagagactaaaaacaacaggggaaggctggacactcaaggtttgggagtataagcaccccacttctggctcagggatttggggagtagggtaaacaaaacctacttggaaaagaattggggaagaaaaccaacaactgccttatgcaggggtggggacagggaaggaggtagggccagggacaggagcatttcacatcactaacctaacttgggaagctgtaagggaccatctt

SEQ ID NO: 865 - DNA, 426 bp, Homo sapiens
aaatcaattcaaatatctcttaaatgcctttgtaaaatcagctctatactaggtgtgaaggagataagaaatattacaaaaatgtctttgttccaaatttcctcatagtatagttgggaaaggcaaaagaagcagacatgaaaaatttaagtatccacataagatgatccatgtatcataaagagtgatgtaggcatttaagatttacaggagaagaaggctctttttgttgatattttctgcttggaccaagaatatttatctggtaatactgttaattggaaatacttttgctgctgcaattgtatacattatgctaatctgcattttcttatccaaaacaagagcactcattaaggactccctgacgtgcagttctggtcagtaacaatacccttaacccttccctcaccctcatcatggcag

SEQ ID NO: 866 - DNA, 458 bp, Homo sapiens
ccaatttcgggagatccatgctggtgtgctgtctctcggctagtgcttccttcttctcgaggatggcatagccagcatctgcagtggctgactcccgcctctcgtcatctcgcagggagctgataggctggaagctatttttgaagttttctttttgtttgttgagactgcgggcccagcgttccatgtccttggcaatctgttgagctgtcttggtcttgtgcttctccttcttctctttgccctccttcgagggtgcccctgtctccttatgtccgtcggccgactgctccagggcgggaacataggtccgcctctccccatcccagtacaggtactgctggctctgagcattgtagtaatactgggagttggggtcatagtagaggccggtctgggggtcatagtagtagccggaggtctcatcgtactggtaggtagagacgtcgggaacaggg

SEQ ID NO: 867 - DNA, 392 bp, Homo sapiens
ctggcttcacagatttcttactgcccatgttggagctgatccctgagaagagagccactgccgccgagtgtctccggcacccttggcttaactcctaagcccctgcccagcaccacagcagagatcacacactgaccctccgcccttccccttcaagcattttcctcttcccttttcagggtgaagctcttccttcaagagtttctagatcttgttttttttttaatccaacatgttcatttgggtttgcttacttgaccctgtggagatccccacagccattgggcatcctaggtgaatttggccttggttgggctctgccaaagactaatggactaaaatgtgaaacagcctcttgccctgtacctttccttcccattaggacatccttt

SEQ ID NO: 868 - DNA, 203 bp, Homo sapiens
aaagtagttttctttaggaactgtcagcatgttgttgttgaagtgtggagttgtaactctgcgtggactatggacagtcaacaatatgtacttaaaagttgcactattgcaaaacgggtgtattatccaggtactcgtacactatttttttgtactgctggtcctgtaccagaaacattttcttttattgttacttgcttttt

SEQ ID NO: 869 - DNA, 240 bp, Homo sapiens
cacctttcatgatcacgccctcataatcattttccttatctgcttcctagtcctgtatgcccttttcctaacactcacaacaaaactaactaatactaacatctcagacgctcaggaaatagaaaccgtctgaactatcctgcccgccatcatcctagtcctcatcgccctcccatccctacgcatcctttacataacagacgaggtcaacgatccctcccttaccatcaaatcaattgg

SEQ ID NO: 870 - DNA, 479 bp, Homo sapiens
aaagagcctgagatttatatttaactcgaacaacagtttgcctctgttgcccctgtgttcatgttttcctaagccagagtttcccacgcctcctgttcctggcagcccaagtgccttcgctgggctactcccacctggcccttgcttttcattccttagggcagtcacttagcaccttccaaagtgcctgcacatgtttcttatttcatttcttaaacattcatattaccactatttagattgaaggaacagaattggtttgggcttgaagagaatacaaagagatctgtcttcaattatctgatagtagtaaagtttcacgggagaaagaaagatttcggttccacataaggaaaaacttggaaagttttgaatggaaagttcatagagagattcagtaaccacctgtcaggaattttgtaaagacgtctacggccatatcaccctgaacgcgcctgatctcatctgatctcggaagc

SEQ ID NO: 871 - DNA, 555 bp, Homo sapiens
  misc_feature 521: n = A,T,C or G
aaagttgctttgctggaagtttttataaggaatctcaaattaaacttttagaagtttaattgacactaggaagccaaaccaaggctgacttcagactttgtttgtagtacctgtgggtttattacctatgggtttatatcctcaaatacgacattctagtcaaagtcttggtaatataaccaatgttttcaaatgtattctgttatacaaagagcagatttttattgaacttgtgcaataactatattaccatacaatataaatattcatgaatagtttcccaagtctggagcgaccacatagggagaaaatgtaaatgtctcaatttttgttcacaaaagtatattttatcaaattgctgtaagctgtggatagcttaaaagaaaaaaagtttcctgaaatctgggaaacaagacatttaaagaatcagcaaaatttcaaataaaaaattatgaaaatattatcctcattagttcatttagtcccatgaaattaattattttctctgcttgatcttggtngacagtttcatgaagctgtcagttagttcattaa

SEQ ID NO: 872 - DNA, 94 bp, Homo sapiens
ccttagagccacagcggcggcacaacgtgtgcgtcttattgcgacgctttccaaacgatgacgttcccttcgtcatctcgcttctgcggccgag

SEQ ID NO: 873 - DNA, 294 bp, Homo sapiens; identical to SEQ ID NO: 292

SEQ ID NO: 874 - DNA, 298 bp, Homo sapiens
  misc_feature 284, 296: n = A,T,C or G
cctataattcctaccttgactgtgtgcatcatttgtaagctagcagatctatgtggtgaaaatgcacaggagcttggtagactgcgggggaaagagagagctcctttcgccatgttttaccagtctactgttataacctcttaggttgtatcctttaatttccagccttttaggttagtttctgtaacagaacaagtgagtctgggatgaagtcctcaaagtacttcaaatggtaattgttttgtttttgtaatagcttaacaaataaacctaggttttctatngaaaaaaaaaangc

SEQ ID NO: 875 - DNA, 276 bp, Homo sapiens
attatcctctgtttctctgctgcaccgacctcgacgtcttgcctgtgtcccacttgttcgcggcctataggctactgcagcactggggtgtcagttgttggtccgacccagaacgcttcagttgtgctctgcaaggatatataataactgattggtgtgcccgtttaataaaagaatatggaaactgaacagccagaagaaaccttccctaacactgaaaccaatggtgaatttggtaaacgccctgcagaagatatggaagaggaacaagcattt

SEQ ID NO: 876 - DNA, 452 bp, Homo sapiens
ttgaagatggtcccttacagcttcccaagttaggttagtgatgtgaaatgctcctgtccctggccctacctccttccctgtccccacccctgcataaggcagttgttggttttcttccccaattcttttccaagtaggttttgtttaccctactccccaaatccctgagccagaagtggggtgcttatactcccaaaccttgagtctccagccttcccctgttgcttttagtctcttgtgctgtgcctagtggcacctgggctggggaggacactgccccgtctaggtttttataaatgtcttactcaagttcaaacctccagcctgtgaatcaactgtgtctcttttttgacttggtaagcaagtattaggctttggggtgggggaggtctgtaatgtgaaacaacttcttgtcttttttctctcccactgttgtaaataacttttaatgg

SEQ ID NO: 877 - DNA, 289 bp, Homo sapiens
  misc_feature 185, 262: n = A,T,C or G
aaaaacaacaccaaagcaaacccatagcccctgtcaagccagtcctcagggagagtgagctggaaggctccccctgcacttctctgagcagagatcttgggcccctcccactggaccccagcctgagcagagggcaaggctctgcctgctggtaccctagggggtgggggagaagcgatcagctncaaaccatgcaagaaaaacaagccaaacccataaagcaaaagaaaaaatcaacagaggataaattaaaaaaaacacnaaaggtgaatgacaccgataacggtgg

SEQ ID NO: 878 - DNA, 411 bp, Homo sapiens
ctgcatatggcctgggagtcatggcacagtacggtggagataattatcgccctttttgtacagaagcacttcccctgctggtaagagttattcagtctgcggattctaagatcaaagaaaatgtcaatgctacagagaactgcatctcagcagtagggaaaatcatgaagttcaagcctgactgtgtaaacgttgaagaggtccttccacactggttgtcttggcttccactacatgaagataaagaagaagctgttcagactttcaattatctgtgtgacctgattgaaagtaatcatccaattgttcttggcccaaacaataccaatctgcccaaaatatttagtataattgcggaaggagaaatgcacgaggcaattaaacatgaagatccttgtgccaaacgtctgg

SEQ ID NO: 879 - DNA, 423 bp, Homo sapiens
aaacagttggaacaccggtggcactgttaactgctttctgggcagcctctttagcttggtgggcttgtagtacagctacagcttcatcaaccttagaacggagtgactctggagactcgagcatatgaagaagttctgaattatcaatctccaacaacatgccagtgattttaccagcaagagtagggtgcatggcttgaataagaggaaacagccgttcacccaacatttgcttttgctcttgaggaggggcagatgccaacatggaagcagtcaaaggttcctgaccttgtacatgaacagcaggctgttgcattgtaacttgtggctgtgcattaagatgttgctgaggattgcgaactcctgcagcatatttatactgtggaacggtgcggacagcaggagtagctgcagcggctgcag

SEQ ID NO: 880 - DNA, 437 bp, Homo sapiens
ctgggggacgtggttcacggcgtggaaagcctagtggagcttctgggctggacagaagagatgcgggaccttgtgcagcgggaaactgggaagcttgatggaccagacaaataggatgatggctgcccccacacaataaatggtaacataggagacatccacatcccaattctgacaagacctcatgcctgaagacagcttgggcaggtgaaaccagaatatgtgaactgagtggacacccgaggctgccactggaatgtcttctcaggccatgagctgcagtgactggtagggctgtgtttacagtcagggccaccccgtcacatatacaaaggagctgcctgcctgtttgctgtgttgaactcttcactctgctgaagctcctaatggaaaaagctttcttctgactgtgaccctcttgaactgaatcagaccaa

SEQ ID NO: 881 - DNA, 411 bp, Homo sapiens
  misc_feature 160, 332, 380: n = A,T,C or G
caagctttttttttttttttttttttttttttttggttaaaaaagtttaatgagctgtaaaataaatacacttccattaaatattaaataaattatttacaacttgaaaaaatactttttaccttcgtgcacctttatatacagaaatagcataaaaagngacaattgaaagtttaaaaccatcataacaaaaagggtccattgtcttatgatccactggaaagaggaccgactcatcatttatggctatgacttggcagtgactccaatgtgatatcctgtaattttatcttcagttatgctatagcatgtacatttccattctcttgtcnaagtttctttcgttcctcacttctccttcatatttcctgacgtattgncttctaagctggactgtaataacagcaacag

SEQ ID NO: 882 - DNA, 358 bp, Homo sapiens
ccactagaggtctgtgtgccattgcccaggcagagtctctgcgttacaaactcctaggagggcttgctgtgcggagggcctgctatggtgtgctgcggttcatcatggagagtggggccaaaggctgcgaggttgtggtgtctgggaaactccgaggacagagggctaaatccatgaagtttgtggatggcctgatgatccacagcggagaccctgttaactactacgttgacactgctgtgcgccacgtgttgctcagacagggtgtgctgggcatcaaggtgaagatcatgctgccctgggacccaactggtaagattggccctaagaagcccctgcctgaccacgcgagcattgt

SEQ ID NO: 883 - DNA, 297 bp, Homo sapiens
ctgactatccaacatgattcctatggaaacagaaggggcagagtcctggtttgctggcttattgagggcttggcagagaagctaaagctccaaagtgactacagattctctgcaaccggctttgacccatggaaacaggagccagattctcactctagagatagtgagggggccaaacctactcataccacatgcattagtcctggtcatcctccaggaccatgcgtatgatgggcaactcataccaggcaggggaagggagctgattagggaagaagggaccatttttcatctttt

SEQ ID NO: 884 - DNA, 367 bp, Homo sapiens
aatttggttaaaatatctcggcctgataagggaactgggcaggtggagataactaaaaaagagtgcataaaagagtgttgttcaagttggcaccagagttggggagttttaagaggtttagaagcctggctgtcaatacccacaacagttatggaggcaagggaaacaggcccttgaaaagaaggtaatgtggagtgggtagcctccatattgattaagaaggggacagacttaccctccactgtgagagttacctaaagctcggtgtccatggtggtttacagggcttctgaggcgatcaggcagcgtcagtcttcagccactaagccaagaaggagtcagtcagagagccttgggccagtgttcc

SEQ ID NO: 885 - DNA, 194 bp, Homo sapiens
gcaggtaaaaatcctgtgtaaaggagcaccttaaacataccagtgccccccaggaggctccaccctcaactcaacccaagcaacagggacagatgaaaaacaaaatccaatcagggcgataaatggcggggggcaggacgtggtggtctccaggctggcttcgtgcgttcttgcttttgtcactgcccccctgt

SEQ ID NO: 886 - DNA, 253 bp, Homo sapiens
  misc_feature 143: n = A,T,C or G
aaaataaggagttgtgggggaagggtgtcgtgcactcctagagaaaggtacacagttgcccggttgggaatgtgcttggcgctgaccctgcgggcatctgactggtcttccagctcaggaaaaagaatttgaaagaggcttancgtgaaggggaatcaaagaggaggttgtgatttggtcgaaggtgcctggtttagtgctgtaattgtcttattattttttttatatatatatttcttggagtaaacatttt

SEQ ID NO: 887 - DNA, 406 bp, Homo sapiens
ctgaatcgcgcagaatttgaagatcaagatgatgaagccagagttcagtatgagggttttcgacctgggatgtacgtccgcattgagattgaaaatgttccctgtgaatttgtgcagaactttgacccccattaccccattatcctgggtggcttgggcaacagtgagggaaatgttggctacgtgcagatgcgtctgaagaaacatcgctggtataagaaaatcctcaagtcccgagatccaatcatattttctgtagggtggaggaggtttcagaccatcccactgtattatatcgaagaccacaatggaagacaaaggcttctaaagtataccccacagcacatgcattgcggagcagccttttggggccctatcactccacagggaactggtttcttggcaa

SEQ ID NO: 888 - DNA, 172 bp, Homo sapiens
aaatacagggttctaaaaagaaggaaaaaacccagaacatcacatacttttaattatttgtaaaagcattattctagttttctaagtctttatacttaaaaatgaaagcagtgtggaaaagaatccacataagcaggtatcatcagagtttgcgcagattagccaaaacagg

SEQ ID NO: 889 - DNA, 479 bp, Homo sapiens
ctgaggaagctcttcattggagggttgagctttgaaacaactgatgagagcctgaggagccattttgagcaatggggaacgctcacggactgtgtggtaatgagagatccaaacaccaagcgctccaggggctttgggtttgtcacgtatgccactgtggaggaggtggatgcagctatgaatgcaaggccacacaaggtggatggaagagttgtggaaccaaagagagctgtctccagagaagattctcaaagaccaggtgcccacttaactgtgaaaaagatatttgttggtggcattaaagaagacactgaagaacatcacctaagagattattttgaacagtatggaaaaattgaagtgattgaaatcatgactgaccgaggcagtggcaagaaaaggggctttgcctttgtaacctttgacgaccatgactccgtggataagactgtcattcagaaataccatactgtgaatgg

SEQ ID NO: 890 - DNA, 571 bp, Homo sapiens
  misc_feature 29, 40, 139, 211, 351, 379, 559: n = A,T,C or G
gctttttttttttttttttttttttttgnaactaaaaaanaactttatttattgagggcaaggggatgcaaacaatacaaaaatcaaaagcttatctggtatttaacttttctttctctgcttgtcaaatgagagttanattttatttttacatttgctaagtgtcctgatctgctcatgaaatccttctatgggggaagctgtggggcanattccttaagcgaccctttgggacaactcttatcagggaggagcgaactgctcatttctgcctacttctttcccttctgcttcatgtgtactacaaaatagtcattgcatgcaatggtgaggcccgcaattagggaaaanaagctctggaagcccactttgccatctntacactggtccaggtccttcattattttgtccacagccagagggtctttttgattttccaaaaatccagggaactccttttccatgagtactctcaggtcctcctttgttaagtagcctttatccccagcgaatttgtgaaatgtaaacatcatggtttccatggcgtgttccatttganatggcattttgg

SEQ ID NO: 891 - DNA, 170 bp, Homo sapiens
aaaaagtgtttcagatatttctctaattatgtacaacctaaaatgttggtgttttgtatggatcacaagtgcagcattccttaattccttctgctatatgtcacacagttgttatttggagaaccaagtatgtattgcatgaaaacattatgacttttttctcttagttt

SEQ ID NO: 892 - DNA, 563 bp, Homo sapiens
aaatgccatgatccaggatggattttagatcttgttgaaagcagccacatccatggactgcacatagtcctcaaaagcagtgatctgctcctccagcatatctgttccaactttatcatcttcaactacacactgtatttgaagtttcttaattccgtatcccactggaactagtttagatgagccccagactaagccgtctgcttgaatgcttctgacgcactcctctaatttcgccatatctgtctcatcatcccaaggtttcacatctagtaagatggaagacttggcaacaagtgcaggttttttggctttctttgattcatattgtgcaagacgttcttcccttagcctctttgcttcttcactttcctcctcatcatcagatccaaagaggtcaatgtcatcatcatctttactatctgtagctccacttcctgtagtgtcttccacatcggcaggaccatatttgcccaaagctttcttcactcctggcaggctggccttttccttttcgtaagacttgatgtgattataccaacgtagggcatgacacaagtcgg

SEQ ID NO: 893 - DNA, 159 bp, Homo sapiens
gcaaaaccccactctgcatcaactgaacgcaaatcagccactttaattaagctaagcccttactagaccaatgggacttaaacccacaaacacttagttaacagctaagcaccctaatcaactggcttcaatctacttctcccgccgccgggaaaaaag

SEQ ID NO: 894 - DNA, 346 bp, Homo sapiens
  misc_feature 290: n = A,T,C or G
aaatgtgtggaacaatgctacatctacacttggttggcttaatcaacctcttcaatggtgggccctgaggaagcaccaccagagggaggagctccaccaccaggaaatcccccaggcattcctcctggcatgcctcctgcactctggtacagcttggtgatgatggggttgcaaactttctccagctctttctgttgatgttcaaattcttccttctcagcagtctgattcttatcaagccagttgataatttcattacacttgtccagaatcttctgtttgtcctcatngttaatcttgccttgaagtttctcatcttcaacagttgctttcatgttgaaggcat

SEQ ID NO: 895 - DNA, 342 bp, Homo sapiens
ctgaacatctgcagcaaggtcaaggccgaggtgcagaatctcggcggggagcttgttgtctctggggtggacagcgccatgtccctgatccaggcagccaagaacttgatgaatgctgtggtgcagacagtgaaggcatcctacgtcgcctctaccaaataccaaaagtcacagggtatggcttccctcaaccttcctgctgtgtcatggaagatgaaggcaccagagaaaaagccattggtgaagagagagaaacaggatgagacacagaccaagattaaacgggcatctcagaagaagcacgtgaacccggtgcaggccctcagcgagttcaaagctatg

SEQ ID NO: 896 - DNA, 552 bp, Homo sapiens
  misc_feature 438, 441: n = A,T,C or G
atgctaaactgtgaaaaatcagatgaattgataaaagagttccctgcaaccaattgaaaagtgttctgtgcgtctgttttgtgtctggtgcagaatatgacaatctaccaactgtccctttgtttgaagttggtttagctttggaaagttactgtaaatgccttgcttgtatgatcgtccctggtcacccgactttggaatttgcaccatcatgtttcagtgaagatgctgtaaataggttcagattttactgtctatggatttggggtgttacagtagccttattcacctttttaataaaaatacacatgaaaacaagaaagaaatggcttttcttacccagattgtgtacatagagcaatgttggttttttataaagtctaagcaagatgttttgtataaaatctgaattttgcaatgtatttagctacagcttgnttnaacggcagtgtcattcccctttgcactgtaatgaggaaaaaatggtataaaaggttgccaaattgctgcatatttgtgccgtaattatgtaccatgaatatttatttacct

SEQ ID NO: 897 - DNA, 162 bp, Homo sapiens
ccagcagcctctgatctgtgcagggtattaacgtgtcagggctgagtgttctgggatttctctagaggctggcaagaaccagttgttttgtcttgcgggtctgtcagggttggaaagtccaagccgtaggacccagtttcctttcttagctgatgtctttgg

SEQ ID NO: 898 - DNA, 343 bp, Homo sapiens
ccacctgcttgagccagggtggcctcctggaagacctggacaacctcatcctggaggacctgaaggaggaggaggaggaagaggaggaggtggaggacgaggagggcgggcccagggagtgacccctgccaggtgcagatacaaaccagacacggtctgtggctactttgtgttattataagatatgagctcaaaccgagatatgaatgaccttggggagccatctgaggccaagatattgacgggggggattcctgggtcccattttcagcgcccagggtcacagatccacagtgggaagttctgtgggacacattggcactgagccacaaagaaggtgtgg

SEQ ID NO: 899 - DNA, 196 bp, Homo sapiens
cctacagacttatttcttcttggacacacccacggtgcggccacggcggccagtggtcttggtgtgctggcctcggacacgaaggccccagaagtgacgcagccctctatgggcccgaatcttcttcagtcgctccaggtcttcacggagcttgttgtccagaccattggctaggacctggctgtattttccatcc

SEQ ID NO: 900 - DNA, 403 bp, Homo sapiens
ccaccctgaaaatcaggaactccaacttctacacggtggcagtgaccggcctgtccagccagattcagtacatgaacacagtggtcagtacatatgtgactactaacgtctcccttattccacctcggagtgagcaactggtgaattttaccgggaaggccgagatgggaggaccgttttcctatgtgtacttcttctgcacggtacctgagatcctggtgcacaacatagtgatcttcatgcgaacttcagtgaagatttcatacattggcatcatgacccagagctccttggagacacatcactatgtggattgtggaggaaattccacagctatttaacaactgctattggttcttccacacagcgcctgtagaagagagcacagcatatgttcccaagg

SEQ ID NO: 901 - DNA, 461 bp, Homo sapiens
aaattataatttttattcctcagtcaccactgctaatccttcaatttatttcaaagtaacttctggtttttattacatttggaagataaagcaacttatcacatgtaggttacaacttaaaattcgtgtatgagccattgcttatattttctaaatctgacatgacccagggggtttctactgctcctaccaccacccaggacatgcgatgaagattgtgcacgttaccgtgagggcagaagcaggttagtagctataggagctgtcacatggatttactataatgcacttgaaattgtgtatgtgaccttatcaggcatttaaggaccataatctctccttgacctaagaaatcagcttgaagtaattcacttagatttcaaattttaatgtggataccccaaggctgcaaatctgttattcagtacctgctacacttttggggttgcctcttttatgca

SEQ ID NO: 902 - DNA, 256 bp, Homo sapiens
ggccctcccccaactggtgaagaggatacagcagaaaaagatgagttgtagacactgatctgctagtgctgtaatattgtaaatactggactcaggaacttttgttaggaaaaaattgaaagaacttaagtctcgaatgtaattggaatcttcacctcagagtggagttgaaactgctatagcctaagcggctgtttactgcttttcattagcagttgctcacatgtctttgggtgggggggagaagaagaattgg

SEQ ID NO: 903 - DNA, 362 bp, Homo sapiens
ggacagggaggaatcctggctcagcgggagtttgacaggcgattctcccctcattttctggactgggcagcctttggggtcatgacccttccctccatcggcatccccctgctattgtggtactccagcaagaggaaatatgacactcccaaaacgaagaagaactgattggggcttccacagccctcctctcccaagaaatccaggctcctctcccaagaaatccaggtgctttccagactccaaagggtatcttaaatgcaatctcttctctcttagcccttagccactttctcctggatcctgccctgctctcagccatagtgaaggaccagccctaggagtctgcgagagcctccttg

SEQ ID NO: 904 - DNA, 419 bp, Homo sapiens
aaacttcaaaagactggctgccagggaccacagtgaaaaattagacctggagccaatgaaaaacactagcttggaaggaatgggtttttccaaaaatgcaaaattagcatttacagatgcttaggatactatgatttgacaggcttacagtgataaaacaacaaagatgaacagttacaatatttatacgtgtagtgtgtaaagaacacaggttttttaattggcagcaagaaattctatgacagcttctgagacaagtaatcctatgccctatatccaccccatgccaatgacgaccagtcaaaatggtaacacagagtaaaaagtgatctactgtatgtgagtcagaaagtacttgaaaagtgacaaaactgtatgttattaaatgacaaaacatatttagaggctttatttaaaaa

SEQ ID NO: 905 - DNA, 238 bp, Homo sapiens
ccaaaagtttagcatattctgcagcctcttctttatttttcttggtacgctgcttcttcagagcaatacgccgccgtttgtgctgcaggacacgtggagtaacaagacgctgaatcttgggtgctttggtcctaggtttcttaccttctttatttaagggctttcttacaacatactggcggacatcatcttctttagagagattgaaaagtttgcggattctgctagctcttttggg

SEQ ID NO: 906 - DNA, 411 bp, Homo sapiens
ctggtcctctccccacatgtcacactctcctcagcctctcccccaaccctgctctccctcctcccctgccctagcccagggacagagtctaggaggagcctggggcagagctggaggcgggaagagagcactggacagacagctatggtttggattggggaagagattaggaagtaggttcttaaagacccttttttagtaccagatatccagccatattcccagctccattattcaaatcatttcccatagcccagctcctctctgttctccccctactaccaattctttggctcttacacaatttttatccctcaaatattcatccctggcccaaccagtcccctgagcctccctctggtggagactcctccacccatgagctccccagagcatccaagacagagtgca

SEQ ID NO: 907 - DNA, 595 bp, Homo sapiens
  misc_feature 558, 580: n = A,T,C or G
aaaaactgcattactgaatttaacaaaagtcagacactagaatcatatatttgctgcataaaagttgatttgatacctggtggtgattgaatttagtctcaaagactcataaataaaaatctgacttaagacgtagtcataccagtataccaattctcccatcactttgactttcggcagagagattagagcaaaaaatattcaggagaacagtggagttacattgtattatgtatgtttaatataatatcaattttaaggttaaggttaaggaaatcttaattttaaggttaaaccttgagtactagttatagaacttaatattcctggttaaagagtaagttaactgggttattatgtggccttggttgaagaccataaattatgcatttatgcatttgtggttgctttggttctcaatacattgaatatgcatagccccttctagaaatatatatagtgagaaatctgtaaaatgggggagttagactaagtgtgaactaaaatcttcccactgtgtacaggacacatcagctgagagcaaatcagtttttatgnttactcagcaccatcctcactnaaaactattattttt

SEQ ID NO: 908 - DNA, 601 bp, Homo sapiens
  misc_feature 4: n = A,T,C or G
cgantactatagggcgaattgggccctctagatgcatgctcgagcggccgcccgggcaggtaaaaagtatcttgatggttcttttctatttataatttcagactttcataaagtgtaccaagaatttcataaatttgttttcagtgaactgctttttgctatggtaggtcattaaacacagcacttactcttaaaaatgaaaatttctgatcatctaggatattgacacatttcaatttgcagtgtctttttgactggatatattaacgttcctctgaatggcattgatagatggttcagaagagaaactcaatgaaataaagagaatatttattcatggcgattaattaaattatttgcctaacttaagaaaactactgtgcgtaactctcagtttgtgcttaactccatttgacatgaggtgacagaagagagtctgagtctacctgtggaatatgttggtttattttcagtgcttgaagatacattcacaaatacttggtttgggaagacaccgtttaattttaagttaacttgcatgttgtaaatgcgttttatgtttccagggagcctcgaatcttcagtctctcagagaccacag

SEQ ID NO: 909 - DNA, 186 bp, Homo sapiens
ccagcagttcctctttgccttatatttgtggtacgcccggccagccttcaagatgggtttgtcaattcggccacctccagccaccacaccaaccacagctctgttggctgaggagataaccttcttggagccggagggcagcttcacacgggtcttcttggtctcagggttgtgggagataacggt

SEQ ID NO: 910 - DNA, 385 bp, Homo sapiens
ccagggaggacggagactttgacctactccacatggagaggcaaccatgtctggaagtgactatgcctgagtcccagggtgcggcaggtaggaaacattcacagatgaagacagcagattccccacattctcatctttggcctgttcaatgaaaccattgtttgcccatctcttcttagtggaactttaggtctcttttcaagtctcctcagtcatcaatagttcctggggaaaaacagagctggtagacttgaagaggagcattgatgttgggtggcttttgttctttcactgagaaattcggaatacatttgtctcacccctgatattggttcctgatgcccccccaacaaaaataaataaataaattatggctgctttattt

SEQ ID NO: 911 - DNA, 467 bp, Homo sapiens
ctggcccccaggtggagagagatggggaaaaggaggcatcgcagaggaaatgtgatttcatgtgtgacaaacagtggcaaaacaacactggctaagaatttgcagaaacacctcccaaattgcagtgtcatatctcaggatgatttcttcaagccagagtctgagatagagacagataaaaatggatttttgcagtacgatgtgcttgaagcacttaacatggaaaaaatgatgtcagccatttcctgctggatggaaagcgcaagacactctgtggtatcaacagaccaggaaagtgctgaggaaattcccattttaatcatcgaaggttttcttctttttaattataagccccttgacgctatatggaatagaagctatttcctgacgattccatatgaagaatgtaaaaggaggaggagtacaagggtctatcagcctccagactctccgggatactttgatgg

SEQ ID NO: 912 - DNA, 435 bp, Homo sapiens
gatttggtgaagtaccttttggctaaagaccaggcgaagattcccatcaagcgctcggacatgctgaaggacatcatcaaagaatacactgatgtgtaccccgaaatcattgaacgagcaggctattccttggagaaggtatttgggattcaattgaaggaaattgataagaatgaccacttgtacattcttctcagcaccttagagcccactgatgcaggcatactgggaacgactaaggactcacccaagctgggtctgctcatggtgcttcttagcatcatcttcatgaatggaaatcggtccagtgaggctgtcatctgggaggtgctgcgcaagttggggctgcgccctgggatacatcattcactctttggggacgtgaagaagctcatcactgatgagtttgtgaagcagaagtacctggactatgcc

SEQ ID NO: 913 - DNA, 332 bp, Homo sapiens
aaatctgggatataaattaaagatcatatgcacagatcaatttatgttcttgtaataaacttattagaaattggtgtttgtgatagcattttacttgggttactagagatgcttctagtagaccttaatctagcatagttgaacctctgaatatgggaaggttgtattcccagattctttcctgaatagatttgaatttaatgtcatttgggaactccagggtgagtttattgactacccaaactgtattttaccaataaatatgcatatgatctttaattattgaagaaaataaagtgaggacttaaaacaattcatgaaagtggaccttt

SEQ ID NO: 914 - DNA, 468 bp, Homo sapiens
  misc_feature 364, 365: n = A,T,C or G
ccaaaacaaaggggctacaggccccatgcaagccccaaatccagcggggcagtccttaaatcttaaagcaccaaaaggatctcctttgtcttcatgtctcacacccagggcacactgatacaaggggtgggctcccatggctttgggcagctccttcgcaggctggcattgagtgcctgtggctattctgggcacacattgcaagctgtcagtggatctacaattccgggggctggaggacagtggcccttttcccacagctccactaggcagtgccccagtggggactctgtgtggggactccaaccccacatttcccttccacactaccctagcagaggtcctccatgacaccttgatttcnnatttctaccctccagaactataaaagaataaatttaagctactcagtttgtggtactttgttacaacagcactaggaaactaatatagtttattttctgaatt

SEQ ID NO: 915 - DNA, 519 bp, Homo sapiens
ctggtcggtctttcgttgccatggataccaaggatatccctcagattttacaacagatcttcacctccaccatgttgtcgagtgtctaagaagtgcccttcatcaccctgatgacaccaggatttgaaataagacaggaataaagagtattctgaaaaaaagaagatatggatgaagtgaacccatgcagtgactggatgattccggcattcctgggtcttcctacacttgctccgtaatgagaattcagagaagcagccagaaggagacttaaacatggaaagatactccactgatgagtttagaagtgattagggcaagctagttgacctgcactttatcaaaggttggggttaaaggaaggtggttttgagaactatgtgtttggtctatttccaaaaacctgagggggagaaaatactttgcttttgccttaacacatcatctggtcacgttagaaaagtgaccccatcaaactgagcctttgatgtcacattctgacacaagatgcaagtctgt

SEQ ID NO: 916 - DNA, 392 bp, Homo sapiens
ccttaacccttgccctgggagcccccaaggataataacatccctttctggggcaacaaaactgggaccgagtgggtaactgatatttgacaggggaacctaaacagtctacggaagtgtcctgagatgggcgtaaagtcaaacagaccaagcacacaggtaacactgaaataggaaagagtaagagcttctgttcaggctggaggtgctcgtatggtgggacaggaaaggggaaaagagaaaggggcaacatggcagacataccacggttcctacagagattaggggcagccctggcccgggaagtacacagggcagagagctgactctcaggtcaggaaggagtttagctctgacccatcctcagggaccacggctctcccccagcctcag

SEQ ID NO: 917 - DNA, 253 bp, Homo sapiens
ccagtattcctggaggatataacactgacatcagcagggttttcaatggcaacaattgcacgagctgccagcagaagcttctcccaggtcctcttgagatttatgatatagatgccatcacttttccttttatagatgtactgttccatctggaagtcaagattggtgccacctaagtgggttcctgctgcaaggaacttaaggacatcctcctccttcatttgcaggacatcaagggctccggacattgtga

SEQ ID NO: 918 - DNA, 324 bp, Homo sapiens
cctgggatggctcttgggcttgagggcctgttctggcaggatggcaagcagacactggacagggtcacttgggcggccgatatgccagcttccgactcttcaggactgaccacttgtgccgctttatggtgtagaccaggggcaccagcagagccatcatcatcaacatcttgagccccatgcgttttcgatggtcgtgctctggctcagatgcccagcgcaggaaggtgcacacatccttggctatctgggacatggtagctggggtgccatcgtcaaactctaagacatctgtgtagatgggaggggccatggcaatggcct

SEQ ID NO: 919 - DNA, 363 bp, Homo sapiens
ccagaaccaaccaggagctgcaggaaattaacagagtctacaaggaaatgtacaagactgatctggagaaggacattatttcggacacatctggtgacttccgcaagctgatggttgccctggcaaagggtagaagagcagaggatggctctgtcattgattatgaactgattgaccaagatgctcgggatctctatgacgctggagtgaagaggaaaggaactgatgttcccaagtggatcagcatcatgaccgagcggagcgtgccccacctccagaaagtatttgataggtacaagagttacagcccttatgacatgttggaaagcatcaggaaagaggttaaaggagacctggaaatgc

SEQ ID NO: 920 - DNA, 331 bp, Homo sapiens
aaatctgtgtatgtgctctatcacatttattacttgtgtatattaaatcatccctgcattaatggcatgaaacccacttgatcatggtggattttctttttgatatgttgttgaatttggttcattagtattttcttgaggatttttgcatctatgttcatcagggatattggtctgtagctttcttttttgttatgtccttccctggttttgatattatggtgaaactggcttcatagaatgatttgggggaggattctctctttttctatcttttggaatagtgtcaataggattggtaccaattctttgaatgtctgatagaattcag

SEQ ID NO: 921 - DNA, 201 bp, Homo sapiens
ccttatttctcttgtcctttcgtacagggaggaatttgaagtagatagaaaccgacctggattactccggtctgaactcagatcacgtagggctttaatcgttgaacaaacgaacctttaatagcggctgcaccatcgggatgtcctgatccaacatcgaggtcgtaaaccctattgttgatatggactctagaataggat

SEQ ID NO: 922 - DNA, 73 bp, Homo sapiens
tcatgaacttcgcatcaaaagacaattctttatacaacagtgctaaaaatgggacttcttttcacattcttat

SEQ ID NO: 923 - DNA, 545 bp, Homo sapiens
aaagcaagtcaccttagggtggctttaattgtataagtcaagcacatgtaataaattcaaaacctgtagttaacaggatattagacatcaatcctggtaaccaaatattaaagattctctttaaaaaagactgaacatgtttacaggtttgaattaggctaaaaggtcttgcagtggcttttcatggcccttcaaattggaatggaactactgtactttgccatttttctataaatcagtatttttttttaattttgatatacattgtgtgaaaaaagaaaatggctaataaactgtattaaatcttaaacaatgtataaagattgtacttagccagttcaaagtgtatatttattcataatgaattataacagttatatttttgtgttttcttgtaaatgtttcttttcccttaaatacagataattcatttgtattgcttattttattatgagctacaacaaaaggacttcaggaacaagtaatgtattagtatggttcaagattgttgataggaactgtctcaaaaggatggtggttatttt

SEQ ID NO: 924 - DNA, 426 bp, Homo sapiens
ctgcttacttcagtctggtgtcttcaaccaaaatatgtaccttataccaaaacaatgcttattccaaaatattttttgtagctagtagttctttccttggaggtaaagaaaatacacccaaacttttaattaccaggattcagaatatttaagagaacaattttagttaagaatcaaatatacagagattcaaagaggggaaaaaaaggaaatattatagaagacaaaggtcaaactggcattccagatctggagcaattttgtaaagcaggaaaacaactatgacaatctgtagcttcttagatcattatagtgaatgtccccatttactataagtgtttttataatggtgtttcctaaataaaggaacataaatgtacactaaagggtgtttcccaagaatagaggtgaagatattttcatttt

SEQ ID NO: 925 - DNA, 372 bp, Homo sapiens
ccttagggcgggaacacttttcaacccaagccaggcttcaggggcaagcccaccaacagaccccaatttccacaggggaggcagatcttctatacctacagtgacagaaaatacactaaagtgcagtataaaatataaaaaggtttgattctgaatagaccaactgctaattttccttaaaaaaatttttaatttggttgagtaaaaaccaaattagttcactgaatctcattttgtaggtaagagtcttatttgcaatacgaaaactggagcttatgactgctttgattttctctgtagcacaggataaccagtattagtggagaacactacaaaaggtggcttgtggtgagttctttgcatagtggtttt

SEQ ID NO: 926 - DNA, 64 bp, Homo sapiens
ccaattgggttcaccgtctgggggggctgcttattagtctcctggactaggggggcaaagagat

SEQ ID NO: 927 - DNA, 314 bp, Homo sapiens
  misc_feature 277: n = A,T,C or G
ctgcggtgcccggtactgcactgtgcgctgtctggggacccaccaggagaccaggtgtctgaagtggactgtgtgagcctgggcattcccagagaggaagggccgctgtgcactgcccggccttcagaaagacagaatttcatcacccaatgcagggggagctcttcctggaccaagggaggagccgctcattcacccaacaaaactgtgtcttatctgccaggaaagaccagcctcactcctgggaactgtctggcaggtaggctgggccccccantgctgttagaataaaaagcctcgtgccggaaaaaaaa

SEQ ID NO: 928 - DNA, 261 bp, Homo sapiens
ccatggctaggtttatagatagttgggtggttggtgtaaatgagtgaggcaggagtccgaggaggttagttgtggcaataaaaatgattaaggatactagtataagagatcaggttcgtcctttagtgttgtgtatggttatcatttgttttgaggttagtttgattagtcattgttgggtggtgattagtcggttgttgatgagatatttggaggtggggatcaatagagggggaaatagaatgatcagtactgcggcgg

SEQ ID NO: 929 - DNA, 495 bp, Homo sapiens
gctttttgaaaagtttaggttaaacctactgttgttagattaatgtatttgttgcttccctttatctggaatgtggcattagcttttttattttaaccctctttaattcttattcaattccatgacttaaggttggagagctaaacactgggatttttggataacagactgacagttttgcataattataatcggcattgtacatagaaaggatatggctaccttttgttaaatctgcactttctaaatatcaaaaaagggaaatgaagtataaatcaatttttgtataatctgtttgaaacatgagttttatttgcttaatattagggctttgccccttttctgtaagtctcttgggatcctgtgtagaagctgttctcattaaacaccaaacagttaagtccattctctggtactagctacaaattcggtttcatattctacttaacaatttaaataaactgaaatatttctaaaaaaaaaaaaaaacctgcc

SEQ ID NO: 930 - DNA, 88 bp, Homo sapiens
ggcgaattcacttactgaccggcctgggctgctctgagacatggaggaagccagtgaaggtggaggaaatgatcgtgtgcggacctgc

SEQ ID NO: 931 - DNA, 460 bp, Homo sapiens
aattaacagtgcgtatttgcctgaagaaggtcagtgtgcttgcttggagatcaggacgcaaaggtcaccatcagaaaagctaagtttgctgtatagtgaggatcaggagatctgatcctgattgcagaaccttccctgattacagaatcttggatgatttcacaaaagttcatcttcattgcagatacctgcctttctttctaggttgtatctcccacttcacccttctagaccatcccagaagatctataagatttcatctgggaaatcactaggagttcttggaagggaaagaaggaagattgttggttggaataaaaacagggttgaatgagttccagaaagcagggttctcaacctcgtggacagcaatctgcagaagaagagaacttcaaaaaaccaactagaagcaacatgcagagaagtaaaatgagaggggcctcctcaggaaagaagacag

SEQ ID NO: 932 - DNA, 495 bp, Homo sapiens
  misc_feature 360: n = A,T,C or G
ccttacaaataatactccaatgaatcagtccgtaccaagataccccaatgctgtaggattcccatcaaacagtggtcaaggactaatgcaccagcagcccatccaccccagtggctcacttaaccaaatgaacacacaaactatgcatccttcacagcctcagggaacttatgcctctccacctcccatgtcacccatgaaagcaatgagtaatccagcaggcactcctcctccacaagtcaggccgggaagtgctgggataccaatggaagttggcagttatccaaatatgccccatcctcagccatctcaccagccccctggtgccatgggaatcggacagaggaatatgggccccanaaacatgcagcagtctcgtccatttataggcatgtcctcggcaccaagggaattgactgggcacatgaggccaaatggttgtcctggtgttggccttggagacccacaagcaatccaggaacgactgatacctgg

SEQ ID NO: 933 - DNA, 310 bp, Homo sapiens
gccgaagatatgctcatgtggtgttgaggaaagcagacattgacctcaccaagagggcgggagaactcactgaggatgaggtggaacgtgtgatcaccattatgcagaatccacgccagtacaagatcccagactggttcttgaacagacagaaggatgtaaaggatggaaaatacagccaggtcctagccaatggtctggacaacaagctccgtgaagacctggagcgactgaagaagattcgggcccatagagggctgcgtcacttctggggccttcgtgtccgaggccagcacaccaagaccactgg

SEQ ID NO: 934 - DNA, 64 bp, Homo sapiens
aaaaaaaggtaagaaaggtcttcaggagatggtgagttttattttgtcttgtctggatagaggt

SEQ ID NO: 935 - DNA, 520 bp, Homo sapiens
agaagatggctgtgccacccacgtatgccgatcttggcaaatctgccagggatgtcttcaccaagggctatggatttggcttaataaagcttgatttgaaaacaaaatctgagaatggattggaatttacaagctcaggctcagccaacactgagaccaccaaagtgacgggcagtctggaaaccaagtacagatggactgagtacggcctgacgtttacagagaaatggaataccgacaatacactaggcaccgagattactgtggaagatcagcttgcacgtggactgaagctgaccttcgattcatccttctcacctaacactgggaaaaaaatgctaaaatcaagacagggtacaagcgggagcacattaacctgggctgcgacatggatttcgacattgctgggccttccatccggggtgctctggtgctaggttacgagggctggctggccggctaccagatgaattttgagactgcaaaatcccgagtgacccagagcaactttgcagttggc

SEQ ID NO: 936 - DNA, 443 bp, Homo sapiens
aaagattatagaggttgccactgaaagaaaaattttacacagtcactgtacatcaaggttgaaaaactgtcctgcatgaaaaatatacttagaaatcatgtgaataaaagaaaaaagaaaacattattgtgtttaaggaaagattaaagtcctcataatgtgccatctaaatgtggatactcattcttcttggagtcgctaagatgtagaaatttcttgcttctgcccttttcactcattatactgtgttttttcccaacagtattcattaaggcaaacaaatccctttctgaagaggtcttaaggaaattgtggacaaagcaaacttttggcattaaaacaggttaacatatacaaagcctttgtaatatacattaagcatatttttcttggactagtgacaagaaaagatgaacatgcttgttaacaatgtcaaaaagttt

SEQ ID NO: 937 - DNA, 290 bp, Homo sapiens
cgcaaaactaaccccctaataaaattaattaaccactcattcatcgacctccccaccccatccaacatctccgcatgatgaaacttcggctcactccttggcgcctgcctgatcctccaaatcaccacaggactattcctagccatgcactactcaccagacgcctcaaccgccttttcatcaatcgcccacatcactcgagacgtaaattatggctgaatcatccgctaccttcacgccaatggcgcctcaatattctttatctgcctcttcctacacatcgggcgagg

SEQ ID NO: 938 - DNA, 363 bp, Homo sapiens
cctatctggttggcctttttgaagacaccaacctgtgtgctatccatgccaaacgtgtaacaattatgccaaaagacatccagctagcacgccgcatacgtggagaacgtgcttaagaatccactatgatgggaaacatttcattctcaaaaaaaaaaaatttctcttcttcctgttattggtagttctgaacgttagatattttttttccatggggtcaaaaggtacctaagtatatgattgcgagtggaaaaataggggacagaaatcaggtattggcagtttttccattttcatttgtgtgtgaatttttaatataaatgcggagacgtaaagcattaatgcaagttaaaatgtttcagt

SEQ ID NO: 939 - DNA, 552 bp, Homo sapiens
aaatttaagacagttacatgtctttattacataaacatcataatatttctcataggagttggtcttcagtttgcttgttgctttcgcagaatgtcaaatatctatagaaaatgtctaattatttatgaacaaacattcccatccttgccccgcaaaaaatctcattgcctgcaattcctaaccagattcctgagaaaaataataggatttattttatagcatcatacatagattttctttcaagatataaaaaaggacaggcttctaaaacatgaatctcctttcgtttacaaagttctataaaaatacattaagtatgttcaaatgtttgttctttcactttatattccagtttaccagaaacaaaaaatggcagtacataaagatatgtaaaccacattaatcttgcagtaatataatgtcaacatcatcatgaacaccttgcagaagcagctctcctggatatgttacaatcttccttcgttttgcagctttaagagttcctaccaatgcttcaaagaggttggcacatttatcatcacggaagaggac

SEQ ID NO: 940 - DNA, 155 bp, Homo sapiens
aagaaggtgatctaagggccgcggcctcctccacacacacacacacaccaggggaaccaagagaaccacgtagaatcctcaaccgtgcggaccatcaaccttcgagaaattccagttgtctttttcccagccgcatcctgcctgtagatggccgg

SEQ ID NO: 941 - DNA, 465 bp, Homo sapiens
  misc_feature 405: n = A,T,C or G
ccacagaagttgctgctgacgctctgggtgaagaatggaagggttatgtggtccgaatcagtggtgggaacgacaaacaaggtttccccatgaagcagggtgtcttgacccatggccgtgtccgcctgctactgagtaaggggcattcctgttacagaccaaggagaactggagaaagaaagagaaaatcagttcgtggttgcattgtggatgcaaatctgagcgttctcaacttggttattgtaaaaaaaggagagaaggatattcctggactgactgatactacagtgcctcgccgcctgggccccaaaagagctagcagaatccgcaaacttttcaatctctctaaagaagatgatgtccgccagtatgttgtaagaaagcccttaaataaagaaggtaagnaaacctaggaccaaagcacccaagattcagcgtcttgttactccacgtgtcctgcagcac

SEQ ID NO: 942 - DNA, 407 bp, Homo sapiens
aaataaaaaacatttcaaattttgcacaaataatttaggccaatacataactagatttgaataaagtcagatgaagcaataattcctcctctgtgtttgaaaggaatgagtgtggttacaaagtcacaggatgagtccctgggatctggggtgggagaaggggtggatcaagaatgacttgggcttgtcactccctagcaggctgagggcgtgacacagcagctcggtggcggagaggtctattctagtttctaacactccaatgctaactttttggatgtatttccttctagcatgtagaaagggcttttcttggctgccaggaagtagggagcagggatgtggcatggtgatgatctgaggacagccaggcatatgctcagacactttggaaaactggggagggg

SEQ ID NO: 943 - DNA, 259 bp, Homo sapiens
ccaagaagcagtggccttattgcatcccaaaccacgcctcttgaccaggctgcctcccttgtggcagcaacggcacagctaattctactcacagtgcttttaagtgaaaatggtcgagaaagaggcaccaggaagccgtcctggcgcctggcagtccgtgggacgggatggttctggctgtttgagattctcaaaggagcgagcatgtcgtggacacacacagactatttttagattttcttttgcctttgcaaccagg

SEQ ID NO: 944 - DNA, 192 bp, Homo sapiens
ccaggaggttcccccgaccaggttggggagacttggggccagcgcttctggtctggtaaatatgtatgatgtgttgtgcttttttaaccaaggaggggccagtggattcccacagcacaaccggtcccttccatgccctgggatgcctcaccacacccaggtctcttcctttgctctgaggtcccttcaagg

SEQ ID NO: 945 - DNA, 86 bp, Homo sapiens
tgatactggctgagtttgcaatagcaggtggaaccctaactattgagggagtttgcagatacctcaggattcgtgacaatgccttt

SEQ ID NO: 946 - DNA, 299 bp, Homo sapiens
cctgcgttatatactagaaaaatttcttcattatatgcaaaatatttatctcctctagtaaaggagattaaagaacaactgcaagaggaaggaaggtcctgaaagtgtttcatttggtatctacctaccccaaccccaagacataaagacagataaaggcactaagatgctagtatgtggctagtcctttcaataacccagtcagtccatacagataacccatgggatatattcaagccactctttgagccatcgatggtcattatttggttagttcacccaaggtaaggccataccag

SEQ ID NO: 947 - DNA, 210 bp, Homo sapiens
ctgaagctgggggcctgggtcctaccctgtctggtcatgaccccattaggtatggagagctgggaggaggcattgtcacttcccaccaggatgcaggacttggggttgaggtgagtcatggcctcttgctggcaatggggtgggaggagtacccccaagtcctctcactcctccagcctggaatgtgaagtgactccccaacccctttgg

SEQ ID NO: 948 - DNA, 311 bp, Homo sapiens
ccagcatattttgcgagtactcaacaccaacatcgatgggcggcggaaaatagcctttgccatcactgccattaagggtgtgggccgaagatatgctcatgtggtgttgaggaaagcagacattgacctcaccaagagggcgggagaactcactgaggatgaggtggaacgtgtgatcaccattatgcagaatccacgccagtacaagatcccagactggttcttgaacagacagaaggatgtaaaggatggaaaatacagccaggtcctagccaatggtctggacaacaagctccgtgaagacctggagc

SEQ ID NO: 949 - DNA, 283 bp, Homo sapiens
  misc_feature 94: n = A,T,C or G
ctgcaatccatttatttcatttacaaaagatttattgtaagcctctcaatcttggtttttcagttgatcttaagcatgtcaattcataaaaacnagtcatttttgtatttttcatctttaagaatgcttaaaaaagctaatccctaaaatagttagatctttgtaaatgcatattaaataataaagtatgacccacattactttttatgggtgaaaataagacaaaaataatagttttagtgaggatggtgctgagtaaacataaaaactgatttgctctcag

SEQ ID NO: 950 - DNA, 204 bp, Homo sapiens
gaaaccttcaccgtgaagtcctgtcctgatgccatcaaagaggtcttcgacaataaattccacatcatcggcgcagtgggcatcggcattgccgtggtcatgatatttggcatgatcttcagtatgatcttgtgctgtgctatccgcaggaaccgcgagatggtctagagtcagcttacatccctgagcaggaaagtttaccca

SEQ ID NO: 951 - DNA, 121 bp, Homo sapiens
aaaaagctagaaccaatgataaatgatgcacttcagaaagaatccaagttccagaataatgtaattgtaattcctagtaccttaaagaatgaggttgtgtgtattttatttttcttaactc

SEQ ID NO: 952 - DNA, 359 bp, Homo sapiens
cctcacttcctgtagcttggggtgttatttaagcttctgccatctggcccacattaaaaaatgtatatgctttttctcctgttaatctgtctattgtcagcttgttttatagattcaaattcttaaaccttcaaggtctagaaaggaagttccttctacccctccaatagtataaagaagtggagccttttggtaggtgatagagtcatgagggccctgcctttaggcatagagttagtgcctttataaaagaggcccaggggggcttgtttgccccttctgccatgtgagaacacagcaagacagtgccatctgtgaagtagagagtgagccctcacgagatgtggaatctgctggtg

SEQ ID NO: 953 - DNA, 516 bp, Homo sapiens
aaatgactgtgctgcccctttgcatcttacaaagttaaacagctaaaagaagtaaaataagaaggcaatgcttgtggaatgtacagtgcatattggcggcgcacgcctcattacgattcgcctgcttgcttctcctgttcaatcgtttctttggaaggcagtggatttttctcttgcgtctctgtcttcttcagtttcgacttatcgaatttctcgatctcagccatatcgggtttgtcagacatggttgcggaggaaaagcgaagcgaggcgcctgcctttcccatctgtctatctatctggctggcagggaaggaaagaacttgcatgttggtgaaggaagaagtggggtggaagaagtggggtgggacgacagtgaaatctagagtaaaaccaagctggcccaaggtgtcctgcaggctgtaatgcagtttaatcagagtgccattttttttttgttcaaatgattttaattattggaatgcacaatttttttaatatgcaaataaaaagttt

SEQ ID NO: 954 - DNA, 555 bp, Homo sapiens
cctgacagacgcgggcagtgatgagccctgttctggagtggaaagagcacgatagagcaccaggctaagaggcacgagatcaaggcggtagtcacttccgctctgcagctagcatttcaaccatatgtggatcctttcatttctcagctccctggattccttcccctaaattaggacctattatttacctgtaggtaagcaagctactgtagctcttctgaggtatctgccaggctgttttctgtagcctcagattgcctacctgcttagcctgagaacaggtagatgaaaactaaactgatgcctaggcccagggtcagtctcagatggaagctgggcctgggtggggaggctagcatgcgtggctccctgggtatttctgtcagtccccatggcaagcagtgatttagtaaaacaccccagagtcagggaagccaaccaccttgaaacctttagaacatctctgctttggagaaagacccagagatcaggcagaggtgcagattcaatcattactcataacctttgagagatggcaaatgggaggagtgttag

SEQ ID NO: 955 - DNA, 173 bp, Homo sapiens
  misc_feature 54, 97, 119: n = A,T,C or G
gctttttttttttttttttttttttttttttaggggaaaataacttttattganaccccaccaactgcaaaatctgttcctggcattaagctccttnttcctttgcaattcggtctttnttcagtggtcccatgaatgctttcttctcctccatggtctggaagcggccatgg

SEQ ID NO: 956 - DNA, 350 bp, Homo sapiens
ctgaggagactccggcgctcgccatggccgacgaaaagcccaaggaaggagtcaagactgagaacaacgatcatattaatttgaaggtggcggggcaggatggttctgtggtgcagtttaagattaagaggcatacaccacttagtaaactaatgaaagcctattgtgaacgacagggattgtcaatgaggcagatcagattccgatttgacgggcaaccaatcaatgaaacagacacacctgcacagttggaaatggaggatgaagatacaattgatgtgttccaacagcagacgggaggtgtctactgaaaagggaacctgcttctttactccagaactctgttcttt

SEQ ID NO: 957 - DNA, 282 bp, Homo sapiens
aaagaacatttttattactttcaagtttatacagtaatctggcacaagctattgccagcattcctgccaagtacaaatgcttggacctccccttaatcaacagataaaatacataacttacatttaaggggagtggatacctcaaagtgcttaagtaaaaatttgttctctttaatagtttgaactgtcccttgttagtcgtgtctaaaacattgacctgaataatgagaaatcacaagctaatgttttacttattccttatatggtaagagactacctttt

SEQ ID NO: 958 - DNA, 209 bp, Homo sapiens
ctgaatcaactccaggtgcccgtagtcgtgataccaagagtagtagctgttcaaacagatcacatccacatacggagcccccttgtctgctgcatagttagagttgctcacaaaggtcacaggccgggaggggtccaaggatttggtgtgagcgatcaccatcttcaagtagtagccagcagattctaggtgggacgcaggctcgttgg

SEQ ID NO: 959 - DNA, 576 bp, Homo sapiens
ccatctgatctataaatgcggtggcatcgacaaaagaaccattgaaaaatttgagaaggaggctgctgagatgggaaagggctccttcaagtatgcctgggtcttggataaactgaaagctgagcgtgaacgtggtatcaccattgatatctccttgtggaaatttgagaccagcaagtactatgtgactatcattgatgccccaggacacagagactttatcaaaaacatgattacagggacatctcaggctgactgtgctgtcctgattgttgctgctggtgttggtgaatttgaagctggtatctccaagaatgggcagacccgagagcatgcccttctggcttacacactgggtgtgaaacaactaattgtcggtgttaacaaaatggattccactgagccaccctacagccagaagagatatgaggaaattgttaaggaagtcagcacttacattaagaaaattggctacaaccccgacacagtagcatttgttccaatttctggttggaatggtgacaacatgctggagccaagtgctaacatgccttggttcaagggatggaaagtcac

SEQ ID NO: 960 - DNA, 486 bp, Homo sapiens
aaaagaaacatgaaatcataaagcaaagctaacagccaaccaacaaataccgcctagcaatgatttccactggatgtgggagagggttaataaagacgctgttggtaacgcgtacagaactatcactggcaatcagcatactgagctatccagtggaggccagcatcgtgtttttgctaaaatacatgttgtagaagtcataattcatagtgaagaatctcaacaggttttcttacagatttaattactctcacacaaataattcatttggaaaccataaaagatacctatttacacctaaactgcctggccttccagagcggggactaaaggggcagggcggggaagaaagcgagcgtgtcgcgggctctgtggggttgcagggtcactgttattttgatctgctgagctcaaggactggaaacggaataaaaatgcctactcgccttaggcaggataagaagttgtaaactcacccatcagcag

SEQ ID NO: 961 - DNA, 324 bp, Homo sapiens
ccttggccgctgccgaactgctgaagaaagaaaagatcaacatccgcgtgctggaccccttcaccatcaagcccctggacagaaaactcattctcgacagcgctcgtgccaccaagggcaggatcctcaccgtggaggaccattattatgaaggtggcattggtgaggctgtgtccagtgcagtagtgggcgagcctggcatcactgtcacccacctggcagttaaccgggtaccaagaagtgggaagccggctgagctgctgaagatgtttggtatcgacagggatgccattgcacaagctgtgaggggcctcatcaccaagg

SEQ ID NO: 962 - DNA, 475 bp, Homo sapiens
ctgtcaggggcggcgtgcctggtgatgcggcatcttaccttcatccccatctcagaatgggcagccagtctcagattcaaggaggaggaatcctgaggtgtggcgttcagtcctgaggtagacctgaggtcccctggaaattgtgttgatgctgagatggatgaggggtgctcattctctcaggtagacagtgaggagtcctggttcagccgagcctccatgtctgcatggatggttatgaccctgattgtttttggaaacagccaagctctctaggtgtactcagcaaatgcaaggtatagtgggtcctgcatacccagggtattatttgagccatggaagcaaaacagagactgcttagcctccctaagagtagttggtgggagaggccagcaaccatggaggcaggagcagctcctctttgcctctgagtagtccccacatgttccctcttccagagatttcaactgccagg

SEQ ID NO: 963 - DNA, 202 bp, Homo sapiens
cctagtacaatcttgggaacagggttactgtatactgaaggtctgacagtagctcttagactcgcctatcttaggtagtcatgctgtgcattttttttttcattggtgtactgtgtttgatttgtctcatatatttggagtttttctgaaaaatggagcagtaatgcagcatcaacctattaaaatacattttaagcctttt

SEQ ID NO: 964 - DNA, 596 bp, Homo sapiens
  misc_feature 537, 590: n = A,T,C or G
ctgagaagagtgaggcagcgcctccggcccctcctgtgacgcacagcactcctgtaactgtctcagaaccactcctggagaaagacttccttgcaggagtgactcaagaattaatcaagactcttgaagacaactctgaaaagtgggctgtgattcccgatgcaggggatggtgtggtcaagccctcgtctagagcagaccccgcccagacctctgacacattagccttgaacaaccagatggtgacccagaacaggactccacacagcgtttgccaccagaaaccacaagcaaaatctggatcttgggacctccaaacttatagcgctgaccaacgcacaacaggaaactgggaatctcataggaagagccaggacatgaagaaaaggaaatatgatccatcttaactgaggctcaggccacataattggactctgtcacaaagggactttggaaaactactttttggtcatgaaattgttcatcgctgctggagaatgaacgtcattgcaatttatcttgcttcattctgaaccnttatcaaaaggatctgactgagagcccactgcagttagagctgagcacttttnaaaagc

SEQ ID NO: 965 - DNA, 400 bp, Homo sapiens
aaattttacaccttttcttaagaattctaatgccgtcttaagtttttataccaataatgctgagctttaagtgtaggatctggtagtacagacagtgtgatggatgatgctgctggttgtaaatttcatcgtgtgtgtctaattttttttcctgttgaatgggtaaaaacaaaacaaaactttttttagaagatgaatttgctgtcatgttttgtggaatgagggaccgttgagctcactaccacctggagtttgagttgaagcatgaaaatggtgcccatgcctgacgctccagcgcctggatctgcacgtgcccttgtagaggatccttaccgtcctagagagcagacgctttctgaaaactacttgctccaaaagaccctctgagttaacgtttcag

SEQ ID NO: 966 - DNA, 268 bp, Homo sapiens
ctggggggcttcctccagaccaccggcctcggccccggcatccctgttgggcgtcagcctgagagtccctactgtgcgtcagaatccaccttgcgtgctgtgcgtatctgtgaacctggagcggttacttattttgacagatatcactttgggtctttttacattaaatttcttttctctaaggaatataagacataccccatagctctgtgtgagccagcaataccgctgccccctggcgacagggcagaccaatgatgccaggcag

SEQ ID NO: 967 - DNA, 544 bp, Homo sapiens
aaaatactacatgacattctgtctattcaatcacctggtggtcatctttcttgtactaattaactgttgatgagcattttggatattctaggagaaagcctataatttcacatagtttctctttttcatgtaactgtaacctaaatgtattacttctgataaaactatatatcaaatgtcactgcaaattagttttatatctgtcatgtgagatttgtcttacttatttttcttttggttgccatggaagttatggccctgaaaatcgtctccctccccttctcttgctgtacagcatgcgttctctttttgtggttgctggctgggtactgtatttaatgaagtagagaatagcacttgcaaaaatacagtcttggtacctagagactgtcatgcagatagtataatttggtatatgtgctaatgcattgagtaaaggattattttaacacactattttgcttttgtattttagttaaaataatcgatggggatgtgtagcccccccgtgtgaggatgacatcaccacatttctagtttcatg

SEQ ID NO: 968 - DNA, 345 bp, Homo sapiens
ctgacgtggaagccctgggtgggcgtcccctggctggcctggcttttgggttcaagtctgtatgtatggagtgggttggggccccaaagctttgctgctattgatttgtccccgacagcaggcaaagcctcacattgccctcaattttccccctttcatttgaaggaccagtttttcatggtacttgtcttgatctttttcatagtgttcaaatctgtatttttgtatgtagagggaaataattttctcaacactaatcgttaataactattgtattaaattgtcatgaaggaacttgtttaataaatggacgtgtaaggaaaaaaaaaaaaaaaaaaaaaaaaa

SEQ ID NO: 969 - DNA, 341 bp, Homo sapiens
  misc_feature 31, 111, 114, 153, 293, 326: n = A,T,C or G
ctgcccaagggcgttcgtaacgggaatgccnaagcgtgggaaaaagggagcggtggcggaagacggggatgagctcaggacagagccagaggccaagaagagtaagacggncgnaaagaaaaatgacaaagaggcagcatggagagggcccanccctgtatgaggaccccccagatcagaaacctcacccagtggcaaacctgccacactcaagatctgctcttggaatgtggatgggcttcgagcctggattaagaagaaaggattagattgggtaaaggaagaagccccanatatactgtgccttcaagagaccaaatgttcanagaacaaactaccag

SEQ ID NO: 970 - DNA, 345 bp, Homo sapiens
aaaccctgcgtggcaatccctgacgcaccgccgtgatgcccagggaagacagggcgacctggaagtccaactacttccttaagatcatccaactattggatgattatccgaaatgtttcattgtgggagcagacaatgtgggctccaagcagatgcagcagatccgcatgtcccttcgcgggaaggctgtggtgctgatgggcaagaacaccatgatgcgcaaggccatccgagggcacctggaaaacaacccagctctggagaaactgctgcctcatatccgggggaatgtgggctttgtgttcaccaaggaggacctcactgagatcagggacatgttgctgg

SEQ ID NO: 971 - DNA, 250 bp, Homo sapiens
ctggagggctcacccatgagggacacgggtggacacccactgcttcacatgcctaattcacattagaaacatgtaaagccattcagtctgtgcaatagagagatcctgtatgaaatccactcattccttggagggaagctggcccggaggcacgctctggttgacgggtgacgcacagtcctccagggcctgcattgcatccatgacacagacacacgtgaacacccagcccgccggtcctagcagccag

SEQ ID NO: 972 - DNA, 304 bp, Homo sapiens
ctgtatagcatcttcactgtaaaggaggtaagtaactccctaagctagcatgttaagtgctgacattgggagaaaatacattacaaagaacaggagctggtttttggttttccttgtggctgtgtttttgattgaagggatgtgggatggtggtgacagaagtctgagcatagtttctgaataattggaggggagatgggcattctttgggactatgtccgcattacattgagttttctccctctaggaagagagagtttgtgttttattttctgtaagtaaaagctacatgtttaggattttt

SEQ ID NO: 973 - DNA, 541 bp, Homo sapiens
  misc_feature 488: n = A,T,C or G
gccgcgtccgttcaccgcggcctcagatgaatgcggctgttaagacctgcaataatccagaatgactactctgatctatgttgataaggaaaatggagaaccaggcacccgtgtggttgctaaggatgggctgaagctggggtctggaccttcaatcaaagccttagatgggagatctcaagtttcaacaccacgttttggcaaaacgttcgatgccccaccagccttacctaaagctactagaaaggctttgggaactgtcaacagagctacagaaaagtctgtaaagaccaagggacccctcaaacaaaaacagccaagcttttctgccaaaaagatgactgagaagactgttaaagcaaaaagctctgttcctgcctcagatgatgcctatccagaaatagaaaaattctttcccttcaatcctctagacttcgagagttttgacctgcctgaagagcaccagattgcgcacctccccttgagtngagtgcctctcatgatccttgacgaggagagagagcttgaaaagctgtttcag

SEQ ID NO: 974 - DNA, 578 bp, Homo sapiens
  misc_feature 499, 503, 550: n = A,T,C or G
aaaaaaaaaaaaagtcaccagcaagtagtcccgggtgggaggtgggagcagaataaaaaaaatctgcaatgattcctaattgtttttcaatacagaagcttgggaaggggtttctgccagtttcatgaggaaggcacaacttccaggtagtgttggggaagggtatgaggtcctatgcaggctggcctcttatcccacagatgccaagatgatgtctactggcagctcctccaaacttctggctgtcacctgcattgtcactgtgtccaaaagcagcagccgggagcgcaccaggatgtcatgaccaccccggaacacaccagccaggagcaacgtgtgggtgttcttgttatccggcactttgtctgacctctcacaagggtgcattcccaagaacttcacaatattacccacagcctcttcaagtgtcttgatggtagacaaggtgaacgtttcctccttctcaaattcatcccctacctcatcccaggctgcttcnaaanttcagtttcatgaccttttgaatgtgatcagctacagtaacttccanatcttccagcacatactcatcctcatag

SEQ ID NO: 975 - DNA, 412 bp, Homo sapiens
aaacctttatactcccctgaatgaatttgaagaacgggtaacagtggcctttatacgaacaatccaggcacaactacaagagcggaatgaccctcagcaactgctattagatgccaagcacatgtttcctgttttgtttccatttaatccatcttctctaaccatggactcaatccacatcccagcgtgtctcaatctggaattcctcaatgaagtctgaagatgcatgtttccagcattagtttgattcccaatgtgagcaagaaggaagtatatacagtaaagtaaattcaaggatctgttaaatctggtaaaagtagatcaaatcagagattgacagcctgtggagggtgctgaactatacagaattagacacaactatgtcattattttttgtacctactgctcagaa

SEQ ID NO: 976 - DNA, 440 bp, Homo sapiens
ggcaggagaatggcgcgaacccgggagacggaggttgcagtgagccgagatcacgccactgcactccagcctgggcgacagagcgagacttcatctcaaaaaaaagaaaaaaaaaggtattcataaggtacctcgagggatgatgaaatgagtaacttgacaaatctttggggcttggaaaagtctactctacatcacttggggcagggcatgacatagcatatatttgggatacacatgcctgacagcccagtcttcatttgaggaatctgggatcaatacatgatccaaatcttggtactgtgggtcttgtatttggatttccatgtggatttcatttcggccagggctggagttactgtccctgttcatgatggtggtgctggtgacctatggggcatcctaacttccttcccaggcagatgtccctgctgcattgg

SEQ ID NO: 977 - DNA, 227 bp, Homo sapiens
ccgggcaggtccataatttattatctcaccacaaggcacaatacacagagctttgagggtccaatacagtcatcgtgacagaacgcaccgcagccttggcacatgatcatggctttcaggctgcacgcacactggagcgagatgctttccaccgtgctgctgtcagtgaacatttgcaaggaaagtgatgcactgtggctcgcaccaaagtttgctttgtggctcag

SEQ ID NO: 978 - DNA, 399 bp, Homo sapiens
gccaaagaggtcgaagtggttctggaaactttggtggtggtcgtggaggtggtttcggtgggaatgacaacttcggtcgtggaggaaacttcagtggtcgtggtggctttggtggcagccgtggtggtggtggatatggtggcagtggggatggctataatggatttggtaatgatggaagcaattttggaggtggtggaagctacaatgattttgggaattacaacaatcagtcttcaaattttggacccatgaagggaggaaattttggaggcagaagctctggcccctatggcggtggaggccaatactttgcaaaaccacgaaaccaaggtggctatggcggttccagcagcagcagtagctatggcagtggcagaagattttaattaggaaaca

SEQ ID NO: 979 - DNA, 381 bp, Homo sapiens
aaacttgggaagagtcataattctgggatgtttcacatgttgtcagctttaaccttctacagacacaggccctctcctctgtgaggagggacctctggcatgtgtgggtgtgtggtgggtccctctccctattagcagaaatgtgttgggcatgagccaggtttatgatttggattgtgtcctgcacataacacctgtgagaatacaactgggactaggacaatgcgggaagcatattcttcatgaggcggtaaccaaaaggcttggctataccaaaggattctggtggccgggcacggtggctcacacctgtaatgccagcactttgggaggccaaggcgggtagatcacttgaggtccaggagttcgagcccagcctgg

SEQ ID NO: 980 - DNA, 373 bp, Homo sapiens
ccacaaatggcgtggtccatgtcatcaccaatgttctgcagcctccagccaacagacctcaggaaagaggggatgaacttgcagactctgcgcttgagatcttcaaacaagcatcagcgttttccagggcttcccagaggtctgtgcgactagcccctgtctatcaaaagttattagagaggatgaagcattagcttgaagcactacaggaggaatgcaccacggcagctctccgccaatttctctcagatttccacagagactgtttgaatgttttcaaaaccaagtatcacactttaatgtacatgggccgcaccataatgagatgtgagccttgtgcatgtgggggaggagggagagagatgtacttttt

SEQ ID NO: 981 - DNA, 486 bp, Homo sapiens
  misc_feature 473: n = A,T,C or G
cctcctcagacactctcaagaggatggggagatgacaccacttgggtacaaacttatgaagaaggtctcttttatgctcaaaaaagtaagaagccattaatggttattcatcacctggaggattgtcaatactctcaagcactaaagaaagtatttgcccaaaatgaagaaatacaagaaatggctcagaataagttcatcatgctaaaccttatgcatgaaaccactgataagaatttatcacctgatgggcaatatgtgcctagaatcatgtttgtagacccttctttaacagttagagctgacatagctggaagatactctaacagattgtacacatatgagcctcgggatttacccctattgatagaaaacatgaagaaagcattaagacttattcagtcagagctataagagatgatagaaaaaagccttcacttcaaagaagtcaaatttcatgaagaaaacctctngcacattgacaaa

SEQ ID NO: 982 - DNA, 448 bp, Homo sapiens
ccagactcctggaagagcagggtcatgctggctgggacacagtagaggggttttatatctggagggtgatagggctgttccctgctaccctcctggatagtctgggaggtcggggagggctcgggtatgacgaaagatgtaatcctcgggtgtttccagtccacagccacaatgctctccacccctttgctcagctccttcacctgtataatctgctcctgctgcatttgctgcaggaacttagagagctttttgtagcttgacttctttatgtccagttgtcgtccttcggggcagcaggagaacatgtggctgccaaggaaagtgctggtgagtaaagggaggtcagcctttttgactcggcacttcaaggcatgtaagaagcattgctgtaacagctcatccatttgttcttgaagcgttttgctatctgtggagtcttggttca

SEQ ID NO: 983 - DNA, 476 bp, Homo sapiens
ctgcatcacggggaacacagcatctcctggatgcaggaagctgcaagcatctggaatgcttattaatttaccccacaaataaatacaaaaggtcaatcttcccagtggaaatgattccatcgatttttgtgactttctgatgagaatgctaaaaagaagagttgccccttttctaaaattccaaatctttcctttttgaagatgactacatgtgaaagaaataaaatgtgaaaagatttgttaaggatgactggctctagtaccaactaaatgccaagggggactgtaagtcactgaggtgacacaaagcagccatgggttttcctcgccttttttatggggaaaatgcacctttcaatcctagaagataattggacttggcaaagtccctatcggtagcaactattttcttactttaaaaaaaaaagggtgagctgggagccagactgtgcacatcagccaagattgctattgcc

SEQ ID NO: 984 - DNA, 333 bp, Homo sapiens
ccacttggcccaggtagaagtagatgaagtgtttggtttcatgtgtcacataactaccgaagttcctccccacgatgcaatgccaggtgggattgtacttcttgtcaaattccttcttgatatgagccgcaatgtccttctctatgttgtatttctccagcgcctgagtagcgcactccaccgagtcctgttgcatctcttccgacatgtccgcatttttgatcacggcctttcggtcgcacatggttaccgtggagaagggggctggccgactgcaacggtctcctgggggaggtgctagcacagctcaggcccggctagagctaccgtcgc

SEQ ID NO: 985 - DNA, 181 bp, Homo sapiens
gggttatcgaatggtggtgaatgaaggttcagatggtggacagtctgtctatcacgttcatctccatgttcttggaggtcggcaaatgcattggcctcctggttaagcacgttttggggataattttctcttctttaggcaatgattaagttaggcaatttccagtatgttaagtaacaca

SEQ ID NO: 986 - DNA, 382 bp, Homo sapiens
ctggccaagaaccgcctctatcaggccagtcagagagctgatgacatcttggacctgaagttctgcatggatggagttcagactgctttgaggagtgaagattatgagcaggctgcagcacatattcatcgctacttgtgcctggacaagtcggtcattgagctcagccgacagggcaaagaggggagcatgattgatgccaacctgaaattgctgcaggaagctgagcaacgtctcaaagccattgtggcagagaagtttgccattgccaccaaggaaggtgatctgccccaggtggagcgcttcttcaagatcttcccactgctgggtttgcatgaggagggattaagaaagttctcggagtacctttgcaagcaggtgg

SEQ ID NO: 987 - DNA, 531 bp, Homo sapiens
  misc_feature 7, 33, 34: n = A,T,C or G
tacgacncactatagggcgaattgggccctctnnatgcatgctcgagcggccgcccgggcaggtctgctctagcacctgacttcctggtagtcagggtaccagggagagggaggagcaccagggtgggggatatttaggggacctctttccttcaggaccacacccttctaggtgaaagcacaaacacttgattactttgcattccatctgcaaaaacagatttaggttttgaatatggtgaaaaacgaagaaaggaaaatataaaactctgtattttatatacagtaaggaataatggaggctgataatgatcttgtgatcagctaagacaatgtcagtaagcaggtgaggtagggtgctttctatgggcaaaagggcgaatatcttgaatgaccagaaatgactcgaagagctgcattactatcatggtagcatgcatgaagtgatacatctaaacctttgctaacctaacattattactctcaagctttattatcctcaaggcttaaatggctgtagctgtttaattt

SEQ ID NO: 988 - DNA, 183 bp, Homo sapiens
ccttcttcaacagcgactctaggaagagctcgagcgcccgggagatgatgacaggcaccgccgccgccaccttcccaatctcttcgtccgtctgcatgatcttcttgatccgcgccggcgggaaccgcgcgttgtacttcttcttcttgctcggcatctcggggcctctctcgccgcgtcggg

SEQ ID NO: 989 - DNA, 350 bp, Homo sapiens
ccaaaaacaaaaaagaaaaaaaacatgacatctgtcatgtaaaacctttttttatccctatgggacttgaggaacagaatcagtacttcagttattgtaaatagtgagctaaacctcaaatttctatcacccagttgcccttttcatgaactaaacaattatctgtgtgattggtatgtttcaccaggtcactgctcatgtataacagtactctttatttgtagataccttttttgtatatatttattattgtaaatcatgtgctgccaccagcagtctgtaagtctaaactattaaatgacacatttatatttggaattttaatttttaactaagcgatcaagtttttt

SEQ ID NO: 990 - DNA, 496 bp, Homo sapiens
aaatgatttttattacggtgtggtcacttatttagatggacattgcttttcaaataacttaaaataacacgttatgtgccatgtggctactttagtaatattgccaagaagagcacagtttttacactagtggcatctcagtgaaattaaccaaagatgaagctttggctttgctggtgagatcagagccctcctgagcaggcagcgccactccagggttcagacagggctgcacaggcggcagagatacagggtctgagggctgagacgccatggggccgctgctgcttatgtggttggattgtttacaagcctcattattaaaactgaaggcattttttttttctgctgcctttcccaaagtggttaggtttggaaaagagatgatgatggtaatattttatttgtgctttttaagccatttccccaaatgggactagcatgcttgttttcagtataccgtggcctgcctcatgatggtttggagatactgtct

SEQ ID NO: 991 - DNA, 450 bp, Homo sapiens
aaaaaacttcgaaagtcacagacacagaatttaggaagctgaaggctgagagtctcccttctcacttaatccatgctttattttgcattcctcacaggtaaggaggcagtgcctgttatgctgtggaccaaaaccagccccacggagctgatcttcaaaaaaatggaatttactctggcatactcctatgtatgatacctttccaaggccaaatcccaagagaccagcaagtgcaactttgggcaatgatccaaatctagaattagctgccaaataaccttggtagactagtccctgggtgacaagcatgcttacaagagaaaaaggcagagctctcttccagaaactttcttcctgacattctcgcataatctttgagatctctgctctgtggatgtgcagttttgattttggacaaaacaacaggctctgcttgcttggtggtggaaa

SEQ ID NO: 992 - DNA, 449 bp, Homo sapiens
  misc_feature 57, 141, 157, 212, 442: n = A,T,C or G
aaactgtctaaaaaaaaaaaaaaaaaaaaaaaaaaaaagcttgtacaaaacctacanacttatttcttcttggacacacccacggtgcggccacggcggccagtggtcttggtgtgctggcctcggacacgaaggccccanaagtgacgcagccctntatgggcccgaatcttcttcagtcgctccaggtcttcacggagcttgttgtccanaccattggctaggacctggctgtattttccatcctttacatccttctgtctgttcaagaaccagtctgggatcttgtactggcgtggattctgcataatggtgatcacacgttccacctcatcctcagtgagttctcccgccctcttggtgaggtcaatgtctgctttcctcaacaccacatgagcatatcttcggcccacacccttaatggcagtgatggcaaaggctnttttccg

SEQ ID NO: 993 - DNA, 459 bp, Homo sapiens
  misc_feature 381: n = A,T,C or G
ctggaacagtatatgaagacctgaggtataagctctcgctagagttccccagtggctacccttacaatgcgcccacagtgaagttcctcacgccctgctatcaccccaacgtggacacccagggtaacatatgcctggacatcctgaaggaaaagtggtctgccctgtatgatgtcaggaccattctgctctccatccagagccttctaggagaacccaacattgatagtcccttgaacacacatgctgccgagctctggaaaaaccccacagcttttaagaagtacctgcaagaaacctactcaaagcaggtcaccagccaggagccctgacccaggctgcccagcctgtccttgtgtcgtctttttaatttttccttanatggtctgtcctttttgtgatttctgtataggactctttatcttgagctgtggtatttttgttttgtttttgtctttt

SEQ ID NO: 994 - DNA, 458 bp, Homo sapiens
aggagggctcacagctcgaagaaccatcatcatcaagggctatgtgcctcccacaggcaagagctttgctatcaacttcaaggtgggctcctcaggggacatagctctgcacattaatccccgcatgggcaacggtaccgtggtccggaacagccttctgaatggctcgtggggatccgaggagaagaagatcacccacaacccatttggtcccggacagttctttgatctgtccattcgctgtggcttggatcgcttcaaggtttacgccaatggaaactctagatcagaattgttgacttgcattcagaacataaatgcacaaaatctgtacatgtctcccatcagaaagattcattggcatgccacaggggattctcctccttcatcctgtaaaggtcaacaataaaaaccaaattatggggctgcttttatcacactagcatagagaatgtgtt

SEQ ID NO: 995 - DNA, 402 bp, Homo sapiens
  misc_feature 398: n = A,T,C or G
ccagtttcagttcttcagcagaactgtctcccttcttgggggccgagggcttcctggggaagaggatgagtttggagcggtactccttcagccgctgcacgttggcctgcagggactccgtggacttgttccgcctcctcggatccacagaaatgccgatggtcacctgcccgggcggccgcccgggcaggtaaaaaaaaaattccagaatgggtaagagaacaatcatcaaggatgtaggtgccagacacagggcagaaggtagctagaaaagtatgccttagggaagttaaaggtctagcctcattcctaccttgttttaatagctgtacctaatataaatagctaagtttcccattgttctagattcctctgccccatctacaaacatggcacanccag

SEQ ID NO: 996 - DNA, 487 bp, Homo sapiens
ctgtttcaaagttggggtctgttcttgaatcccctattaattactgtgtgtgagccagagggagctgtggtaagggttgggcccccagcctgtagggaactttctggactcccactctttgaatcgatataggcatttggtctcactacttgaccattctcaccctgtgaaacgtcccacactttgaagcaaatacaattcacagcacagtacacacaaaaaccttggcataagacagagaaggttcttcttattttgtgggctggttgctgtagaaacacataacaaagggcagccctccacttctggtataattgtgtagccccttttctttgggcttgacacctgtcttgaataagagtgattagagctgcataatgtccctctcttggctattgaccatgtggttcacgtacaaaactctgtataagttgaaggaaaatgttcatgttcatatgtacttgtttgctatgactacattttgagg

SEQ ID NO: 997 - DNA, 529 bp, Homo sapiens
  misc_feature 411, 485: n = A,T,C or G
cctgacattcctgccttcttatattaataagacaaaacaaaatagtgttgaagtgttggagcggcgaaaatttttggggggtggtatggagagagaatgggcgatgtttctcagggctgcttcaagtgggattggggcggcgtgggaacataaagtgggagagattaagctgaagggaagtcttgtggtaagggatgatattgtggggatgttagaagaaacatttgtcatatagaatgattggtgatggcctggacacagttttggatgaactgagaagctaaatggaagatacaaggtctgaataaaaggaggagaaaaatgggtattaaaggactaagaattgggaggacccaggacatccaattagagagtgcccaagggggttcagcgtaattacttgcttggttngcaagtttttgggctctatccttgagtttttttatgttgtcatacaccaggccagactgatttaggtaaaaacnacactcctcatttaagaatatgcagagtcctcctttttcagcag

SEQ ID NO: 998 - DNA, 509 bp, Homo sapiens
  misc_feature 496: n = A,T,C or G
ccaggctggttttgatctcctgacctcaagcgatccactgtcctcggcctcccaaagtgttgagattacaggtgtgagccaccatgctcgctgagagcagatatttgaaatgtcactttgagttctgagaaaaagtaaaaagccagaagacatactagatatataaatatattactgcttaaaaagatttcctaaaaagaaatgtatcaagtgtatgaatcaaagtctgaaagaaagatgaagagccaccagacttctgggtaggtttacatccatcatgttcctcttgactgcctttgtttgtcgtttagttttttgctccactcaagcctgttagaatcaccatggaatacagctccagtgggaaggccactggagaagctgatgtgcactttgagacccatgaggatgctgttgcagcgatgctcaaggatcggtcccacgttcatcataggtatattgaactgttcctgaattcatgtccaaaaggaaaatnagactctaggggc

SEQ ID NO: 999 - DNA, 307 bp, Homo sapiens
  misc_feature 71, 90, 154, 157, 159, 197, 215, 247, 256, 269, 299: n = A,T,C or G
ttttttttttttttttttttttttttctgggaaaagtttctttaataaaaaagttctagtacatatacacnattgtcctcacccttcatntatagcaacgcaacagggaaaataaaaaataaggggcaacctaggcacactcagtataaaaacncananatccatccgaatgggaggcattggggtctggaaaccanaaatgcaggacggccagngggcccagcagctctgggctgcacttttgaanaactttctntaacgttttgaanatagcattaaaaaaaaaaaattaagttgcnccaggagg

SEQ ID NO: 1000 - DNA, 269 bp, Homo sapiens
ccaaacagaagagaaggcagaggcccaccaagagctgatgctgcgcagtccttgggggatcatcctccggtctcactggggacgaacccaggttctggagcctctcccctgacagacagcttgtcaccggcacttatgggtcctctgggatttcagacaatacccaacttctgtaggttcagaaagtgctttcaagcaggcagtggcacccacacccggtgggacacacctcctgggtccgaaaccactccatcatgtggctggtgtgg

SEQ ID NO: 1001 - DNA, 469 bp, Homo sapiens
  misc_feature 248, 250, 256, 265, 414, 448, 462: n = A,T,C or G
ccatcaaggcagcaaatctaatgactccggggaagaagcagaaaaagagtttatttttgtgtaaaggtcacccacgcagaagtcttcctgtgcagggtgctttggtagccatcagagaggaaccaagggcaacatcttttcttcccaggcgttcttctctgggtgctttattctcttctttttctttatttcgcccccacccccatcccctgcctttttttttttttttttttttttttttttgggananaaacanatccatttnttggtaatcaaagcacatttgtttggtcttcctccaaccctttgcatttgatttctaaacattccttcatatgcctttaatgaaagccagcaattatcccatgggccctacttgaatttatctgaggcagctacagattgccctgcaanatgagtttttggagataaatgaaataactggacncacactcacacaangtaacac

SEQ ID NO: 1002 - DNA, 471 bp, Homo sapiens
ccagttgaatgggggaagctgctggcacaggaaggagaggcgatcccggctgaggcttaggaaattgctggagccggctccaagcagataattcactggggaggttttcagagtcaaacatcattctgcctgtgttgggggccaggtgtgtcacacaagcatctcaaagtcaaaagccatctggggctgctgcttctctttctcaggctctggggaaaggaatctccctctcctctcacttgattccaagtgtggttgaattgtctggagcactgggactttttttctcttttccttgatggaccaacagtgcaaatgcaatctcgccatttaactttcaggtcgatttcctttcctgatcagacatctttgtgccccctttaggaaggaaagaatacacctacgatgtgccaggcactgtgttaggcgcttttatatagatcctcgttaggatgagactaagggatgagg

SEQ ID NO: 1003 - DNA, 323 bp, Homo sapiens
  misc_feature 184, 249, 251, 272, 287, 323: n = A,T,C or G
ctgtatgcgtggtccacaggtgtcctttgccttgggtagcctttacaggccgaatttttttttttttttttttttttttttttgagatggagtcttgctctgtcacccaggctggagcgcagtggcacgatcttggctcactgcaacctccgcctcccgggttcaagtgattctcctggctcancctcctgagtagctgggattacaggtgcctgccacacacctggctaatttttgtatttttagtananaaaaaggtgatggtgaggaanaggatggagatgaanatgaggaagctgagtcagctacgggcaagcgggcan

SEQ ID NO: 1004 - DNA, 531 bp, Homo sapiens
aaatgcattttatttttagacaacctacatgacatgtttttcttaaaaacaatgcctccactccaaataaatcacagtcaaaataaatgaagagctcaagatgacatcagtcccatttgtcttaagtcctggtgttgtgtggatgacaagcagaagccagttatgatgacaggtgatagatccaaaataattgccacatttgttaacatttttccatttctaaaccatccttaaagaaaatcatatatggggtcacaccatcctcacggtagtccaatagagcaaccatgccatctggattcatgttttcaccaataaagaactggtagtttttgaaattagcaaggatgtgcttgatttgttctgcagtccctgtcataaaaggttttactctttctggtctctgttcttcaagtttccctttgattgatttcatgtaatctttgatgtacttcttgtaggcttcttttgtgaaacttgtttcctgcaggtgatggttcatgacaatatcgacaccagtgattactgtgc

SEQ ID NO: 1005 - DNA, 384 bp, Homo sapiens
ccaggtgaggccaggacctcacggcctcctttgtgttgtccatggaagaccaacttccgggcaactgaagggaggtttgtagggtccactaggaccccctggagcatcttggaggaggtctgcggacatgggggctgggtggcaaaggaaatacagacctcaaagtggcctacaactccctccagggtgggtcccctcgagggatattcccaggccccttggaagggtaaggcaggggggctttgcctcccagctttgtcttccggtagttaaggcgcttgaaagcttccaggtcccggtgggtgcccatgatcagccggttcaggttggagagctcaacgatgaggccacgcacgacgttggtggcatcctccatcctggagg

SEQ ID NO: 1006 - DNA, 510 bp, Homo sapiens
ccgaagtggactggcccctgggtcagtctggtgggaggacggtgcaacccaaggactgagggactctgaagcctctgggaaatgagaaggcagccaccagcgaatgctaggtctcagactaagcctacctgctctccaagtctcagtggcttcatctgtcaagtgggatctgtcacaccagccatacttatctctctgtgctgtggaagcaacaggaatcaagagctgccctccttgtccacccacctatgtgccaactgttgtaactaggctcagagatgtgcacccatgggctctgacagaaagcagatacctcaccctgctacacatacaggatttgaactcagatctgtctgataggaatgtgaaagcacagactcttactgctaacttttgtgtatcgtaaccagccagatcctcttggttatttgtttaccacttgtattattaatgccattatccctgaattccccttgccaccccaccctccctggagtgtggctgaggagg

SEQ ID NO: 1007 - DNA, 229 bp, Homo sapiens
cctgattcactggcctggcggagatgcttctaaggcatggtcgggggagagggccaacaactgtccctccttgagcaccagccccacccaagcaagcagacatttatcttttgggtctgtcctctctgttgcctttttacagccaacttttctagacctgttttgcttttgtaacttgaagatatttattctgggttttgtagcatttttattaatatggtgacttttt

SEQ ID NO: 1008 - DNA, 370 bp, Homo sapiens
aaagaaaaagacaaaagaaagtggaagtggtattccccacccctccctgcacccatgtgcctgggcttcccctttatttcccttttccatttaccccgtaatgtgtctctacagctaccttaccactgagccgtaagacaaatgtataggaagaagcaaagtctacagcacatagtctttgtaagggattgatgtgaacacttttttttggatgcactaaggagttatcaatacttctggctttatgagagctcttaaattttgtctaaaaaaccaaagggctgtgagtaagggagctatgtggaaagtgggactctgaagtgtattttgaaaattaatcgccaccctcttccaaattatagaatttttt

SEQ ID NO: 1009 - DNA, 559 bp, Homo sapiens
  misc_feature 499: n = A,T,C or G
tgcgagtggagtgtccgctgtgcccgggcctgcaccatgagcgtcccggccttcatcgacatcagtgaagaagatcaggctgctgagcttcgtgcttatctgaaatctaaaggagctgagatttcagaagagaactcggaaggtggacttcatgttgatttagctcaaattattgaagcctgtgatgtgtgtctgaaggaggatgataaagatgttgaaagtgtgatgaacagtgtggtatccctactcttgatcctggaaccagacaagcaagaagctttgattgaaagcctatgtgaaaagctggtcaaatttcgcgaaggtgaacgcccgtctctgagactgcagttgttaagcaaccttttccacgggatggataagaatactcctgtaagatacacagtgtattgcagccttattaaagtggcagcatcttgtggggccatccagtacatcccaactgagctggatcaagttagaaaatggatttctgactggnatctcaccactgaaaaaaagcacacccttttaagactactttatgaggcacttgtggatt

SEQ ID NO: 1010 - DNA, 330 bp, Homo sapiens
ccaccaatggtactgaacctacgagtacaccgactacggcggactaatcttcaactcctacatacttcccccattattcctagaaccaggcgacctgcgactccttgacgttgacaatcgagtagtactcccgattgaagcccccattcgtataataattacatcacaagacgtcttgcactcatgagctgtccccacattaggcttaaaaacagatgcaattcccggacgtctaaaccaaaccactttcaccgctacacgaccgggggtatactacggtcaatgctctgaaatctgtggagcaaaccacagtttcatgcccatcgtcct

SEQ ID NO: 1011 - DNA, 517 bp, Homo sapiens
aaaaaaacaacaacaacattttttcaacaatttcaacaatgacacaaaaattcacatggaaatggggaagatggtctgttttgacagaaactgacaggaatcaatcaaaacaatcgaattttgaattgagtaaagtgcaatttcattggatagctaaatatctttgtaagatagagattgttgaaaattctatttttgtttttctagtcctttcaccccaggactctaaattattggggtaaaaaacagccttgcaagaaaaaggggagctatttttgctttttatgttttttattgttaaacttgtatccctttcacaccattaggtgatgctttggacagaacagagtattttcatcttgtgtttccatcagaataactacaagccatactgaggcggcagcaggagcgaccaactgatcgcacacatgctttgtttggatatggagtgaacacaattatgtaccaaatttaacttggcaaactttctattgcctgtcccatgtgcatcttattt

SEQ ID NO: 1012 - DNA, 308 bp, Homo sapiens
aaacttggcattggctatcttcacacattcctcaagcgttgtgatgaatgtgttacacgtggcactaagcagagaagaggcttcattcatgttctctgcactaggagatgaatgattctcatcatggtgaacaaattcctgtatcgtatgaacttgctgcattaagaggtcacagtagaggcgaagttcagacattttggttttcagcgattcactggtttcacttatttctttttcttttttagtccttgtatcagtcaaacatgctttggagctccccagagcgaccagccacctctgtctttcag

SEQ ID NO: 1013 - DNA, 422 bp, Homo sapiens
ctgatttataatcttctaaaggaagaacagaccccccagaataagattacagttgttggggttggtgctgttggcatggcctgtgccatcagtatcttaatgaaggacttggcagatgaacttgctcttgttgatgtcatcgaagacaaattgaagggagagatgatggatctccaacatggcagccttttccttagaacaccaaagattgtctctggcaaagactataatgtaactgcaaactccaagctggtcattatcacggctggggcacgtcagcaagagggagaaagccgtcttaatttggtccagcgtaacgtgaacatctttaaattcatcattcctaatgttgtaaaatacagcccgaactgcaagttgcttattgtttcaaatccagtggatatcttgacctacgtggcttg

SEQ ID NO: 1014 - DNA, 344 bp, Homo sapiens
caagttcttgttatttccaaatagaatggacttggtctgttaagggctaaggagaagaggaagataaggttaaaagttgttaatgaccaaacattctaaaagaaatgcaaaaaaaaagtttattttcaagccttcgaactatttaaggaaagcaaaatcatttcctaaatgcatatcatttgtgagaatttctcattaatatcctgaatcattcatttcagctaaggcttcatgttgactcgatatgtcatctaggaaagtactatttcatggtccaaacctgttgccatagttggtaaggctttcctttaagtgtgaaatatttagatgaaattttctctttt

SEQ ID NO: 1015 - DNA, 464 bp, Homo sapiens
cctggggctgttgagacgggagatgtccccactgtgctgctcctggttttgtctcctctccaatccttgagcaccctgatatgcaacatggggggtaatcagaaggaggaggcagcctctgatgaggcaacggctgagggtgggggcagtgtgtaaggcaccttttgcggtcagcccggccacactccatcgccagagagaatgccaaagtgtagactgaatgaaattctgtaggcaaatggtaaatggtagctgggccagtagctatttgcatgggtggattatatcatgttaagggaattctttatctcagcagagggaacagaggaatatcttggctaaggtcatcctgccagtcaggagaagccaccctccagggaccacagactcaaagtggctgtggtggagacccaccgcctgggtagggggatgtcaagacactgagaggtttccatctgcagtgg

SEQ ID NO: 1016 - DNA, 506 bp, Homo sapiens
aaagttaaccacagcataatgaatcctcaacgtccagagttctacaaaaatccagcaaaacttacttttgctcattcatcagttctatgtcactccttagtttccctaaaaaaatatggctttataaaaagtagcttctataattcacaaaatgaagagttttattataatttgagtatcatctctgtatcaccgacagcacagctttagaaaattattgcttttcttattatcttattatttcaggtttcattacacatcgagtacccatgcaggactcactacattgtataataactatgatctatagtgataaaaatatagaagtatctttgattttaatcctaaaagcagggggaaaaagtcaccttatcttaatgttaacaaaatcaagagctacccctaatatatcgatcaaaccacttcttatggctttgcttatagttgctcatggtcctttcaaaatgatgtggtagctaccttcttttctgacaaaggattatttt

SEQ ID NO: 1017 - DNA, 408 bp, Homo sapiens
ccacagaaagttccataaacaagtgtactgtttaaccaattcccttctattaccacaacaatatgtacccagggttttatgtatacacttaagatttgggggaatgcaaaagggaagggtgactgtttagaatttccttggaaatgtctgtgcacattacaacgtcccacggagccaaattccttccaaactgatgagcaagctcttgattcttgagtcatgatgttattttcttctaatttttccgaaccgtctttgtttgactggacaccatattgacagcttcagatggtaggccaacatatactcctccatagtttctcctcttgtcatcttctgttacggattcttctgttacatctttggctgctcctgcagggccttggcccgcgcccgcgctggtggcgg

SEQ ID NO: 1018 - DNA, 576 bp, Homo sapiens
cctcctcagacactctcaagaggatggggagatgacatcacttgggtacaaacttatgaagaaggtctcttttatgctcaaaaaagtaagaagccattaatggttattcatcacctggaggattgtcaatactctcaagcactaaagaaagtatttgcccaaaatgaagaaatacaagaaatggctcagaataagttcatcatgctaaaccttatgcatgaaaccactgataagaatttatcacctgatgggcaatatgtgcctagaatcatgtttgtagacccttctttaacagttagagctgacatagctggaagatactctaacagattgtacacatatgagcctcgggatttacccctattgatagaaaacatgaagaaagcattaagacttattcagtcagagctataagaaatgatggaaaaaagccttcacttcaaagaagtcaaatttcatgaagaaaacctctggcacattgacaaatactaaatgtgcaagtatatagattttgtaatattactatttagtttttttaatgtgtttgcaatagtcttattaaaataaatgtttttt

SEQ ID NO: 1019 - DNA, 602 bp, Homo sapiens
cctgggactgatgcaagacagccagccagtcacctccgcctcccatgaacctcttggaaaacttctcctgtcccacttctgccaccctccagctccttgagagagccagagttgagaagaaaatgagcctgaagttgaaagggaaagttcttgcctgaaacagtgctgggaataagtccagaccatttccctcaagagccacctcttcactccttaagccagaggacaccacaaagacacagttaatggcctctcatgccactcctcaggtggcttgtgagggcagccagtgagggactgcaggatttcagggaagtagctcagatggcccactcagaacttctgtaagaatttgaggacaaggtcccgcagtcgcactctgagcatctcgtcattgtcgcagatgatatgggtcgagtcttcttcaatctggatgagcgtctcagcctcctggagcaggacgatatggcccttggctgtgtcctccaccttaatatcactgaagccatgctgctccagaagaaaagaaagaggtgggctgggcagactgcacatctgtgagatctgtaaatgacacttcacagactcgactgaactttcta

SEQ ID NO: 1020 - DNA, 420 bp, Homo sapiens
caaaaatccttgaaatacctgggcacagtggcacacctataatcctagcactttgggaggctgaggcaggcggatcacctgaggttgggagttccagaccagcctgactaacacggtgaaaccccatctctaatgaaaatacaaaaaattagctgggcgtggtggcgggcgcctgtagtcccagctactggggagctgaggcaggaaaatcacttgaactcgggaggtggaggttgcagtgaaccgagattgcaccactgcactccagcctggtgacagtgagactccatctcaaaaaaacaaaaacaaaaacaaaaacaaaaaaacactgacctgatatccaagctttatgtgaataaaaatgtaacttaccatcaaatagtcaataaaaaaaatatgaaaatggacaaggttattgaa

SEQ ID NO: 1021 - DNA, 508 bp, Homo sapiens
  misc_feature 442: n = A,T,C or G
ccaggagctaaacaatttgaggtcaagatgtggcgttaacaatgttcccacagatcacagaaacacaagtggacagcagaggcccttcttgcactagtacttctacctggatggggcctcagaggtctgactttccacaggagaagaaaatctttgagagccaattttactgctgggtgccgatgttttcctcaactgtctaaataaatcttcagctaataaacatttcaataaatctgttctggtgccttccattccttaaactatacagccagagaagatggaacatatgagcttggattctgtctctgtagcggatgcagggatataagtgagctgagttttacacattccaaaggggccactgatcaggtacttcgggatgcactccaagtgtcctggctaattaagataaaccaaagattagacggcatttctggcngggtgcagtggctcacgcctgtaatcccagcactttgggaggccgaggcaggtggattactaggtc

SEQ ID NO: 1022 - DNA, 166 bp, Homo sapiens
cggccgagctgacgcaaacatgcagatctttgtgaagaccctcactggcaaaaccatcacccttgaggtcgagcccagtgacaccattgagaatgtcaaagccaaaattcaagacaaggagggtatcccacctgaccagcagcgtctgatatttgccggcaaacag

SEQ ID NO: 1023 - DNA, 441 bp, Homo sapiens
  misc_feature 390, 391: n = A,T,C or G
tttttttttttttttttgttgtcccagatttattgaaaataatacagcactacagaaaaaattcaaacaggtccccgaggcgttttgaaattcatcccaactgtaggctgagtgacctgaaggttggacagactgccgaagtccaaaagcttcagcatttccttagtgtcaggatctacttcaataatctcctgatccaaggctgagacctcaggaacataattgtctctcctttctctctcctcctcctgcagcttgatggagatacctcttactgggcctctctgaattcgcttcatcagatgcgtgacataacctgctatcttgttgcggagctttttgctggggataatggcgatctcctcgcacacgcgcttgttcgtgtggaanntcgttgcccaggcgcgtgtagtacttttctatgatgacccgggccgcctt

SEQ ID NO: 1024 - DNA, 135 bp, Homo sapiens
cctgcccattgccggcaatggactttgagaaaacccatttcctggcacccaaaagttaaattactcttttcaaaacataccgatctccccaacacttgcaaaagtattacatgcaccattttcccaccattcttt

SEQ ID NO: 1025 - DNA, 340 bp, Homo sapiens
gtagaacactaattcataatcactctaattaattgtaatctgaataaagtgtaacaattgtgtagcctttttgtataaaatagacaaatagaaaatggtccaattagtttcctttttaatatgcttaaaataagcaggtggatctatttcatgtttttgatcaaaaactatttgggatatgtatgggtagggtaaatcagtaagaggtgttatttggaaccttgttttggacagtttaccagttgccttttatcccaaagttgttgtaacctgctgtgatacgatgcttcaagagaaaatgcggttataaaaaatggttcagaattaaacttttaattca

SEQ ID NO: 1026 - DNA, 234 bp, Homo sapiens; identical to SEQ ID NO: 302

SEQ ID NO: 1027 - DNA, 519 bp, Homo sapiens
ctgtgtagtaaagatgccttctggtgaatttgcacgtatatgccgagatctcagccatattggagatgctgttgtaatttcctgtgcaaaagacggagtgaaattttctgcaagtggagaacttggaaatggaaacattaaattgtcacagacaagtaatgtcgataaagaggaggaagctgttaccatagagatgaatgaaccagttcaactaacttttgcactgaggtacctgaacttctttacaaaagccactccactctcttcaacggtgacactcagtatgtctgcagatgtaccccttgttgtagagtataaaattgcggatatgggacacttaaaatactacttggctcccaagatcgaggatgaagaaggatcttaggcattcttaaaattcaagaaaataaaactaagctctttgagaactgcttctaagatgccagcatatactgaagtcttttctgtcaccaaatttgtacctctaagtacatatgtagatattgttttctgtaaata

SEQ ID NO: 1028 - DNA, 238 bp, Homo sapiens
ctgctaggagcccacctgtgttcttcctgaggggtgggggcaccctagtcactgcctagaggcacatggtcccccaccagcctacagcatggaaacacccaatgtctgctctagcctattcttaacccacaactgggatgggagctggggacaggagaaggggtcatggggccaggagcctattcaggctctacaaccagacttccctagagaggccccgtgccagttagtccaatgg

SEQ ID NO: 1029 - DNA, 351 bp, Homo sapiens
ccagaatgggctatgtgtcacagtcctcggggacagcagtgcgtttgtgtgtgtgctgtatgctcgtgtgtgtgctgtgctcgtgtgtgtgctgtgttcatgcgtgtgctgtgtgttgtgtgtgtgtagctgcggggatgcataaagtatgagtgctttttaggatgggaattgagatgtaagatttgggggtgagggtcgtgccaattacatttcatttgcatggattttggttttcatgctctgtcctcccctcctttggtcttactgggtccctctgactgctctgtgatttttagtgatggaaaagggagtgaggagccagtctgggttgttgctattttcggatgg

SEQ ID NO: 1030 - DNA, 525 bp, Homo sapiens
  misc_feature 517: n = A,T,C or G
aaaattgataataatgctgaattatcttaagtgagatgttaagcccactttgttcttttaatgtaatggagcttatgggtagaagaccatgtctactaattacaaaaaaaaaaaaaaaccatgcattgctgcttttcctaccacttccagtaagaaaatgggtgttttgaagaaatcatttgccttgtcctcacggaatctgattaagccctggcctcttgattgtatagagtcattgtgtatattccagttacctagatattcccttgagattttgatacaatttgagggaggcagaagtctgcagttgaagaaaaaaaataagtctgtttgtcatatttaagtagcctgtggctatttttatactgattttgatatcatgttcttttcatagtcgtattttgccaccgtaaacataaaaaaaaaaaagatttccaaaatgccgttttcagaacctgggttttaatagcagtattgaatttgtaagcttagtagttgcagaaattgaacactaggnggcactca

SEQ ID NO: 1031 - DNA, 485 bp, Homo sapiens
ccttggtgatacacctcggtctcaaaggtgatcaggtgcagctcctcagtcacaatcagggaagcatcacaattggctcggcccccattcccacatctctgctccctcagggtcaagtgtttgaattctgcagagaggctgccgttgttggattcttccatgttcatcacttttgtgtttgtgcccagaatgttaaatttccgggatcctctgagagctgcaacgtccccagagtctttgtcaatgcacactttaattttaagctgataattcaactcagggaatttgaccagcaacctgactttagtagtgaactggacgccggtcttgatgacgaggggccggtcaggatgcatgggcatgcagggctgccgctccaccacaaaggcacttttcattaagtttctaaacagctccacgattctctcctccagcatcggccggtgctgtacaatggggtcccctttgtaggaaactttttgctg

SEQ ID NO: 1032 - DNA, 326 bp, Homo sapiens
ccatacaaggtaattttgacaggttcctgggattaggacatgggcatcttgggaggccactactggcctaccacaactgggcagcaaaactattacaccctccggtataatagttttggtgtttcaatgactggggggaaaagggttggaattttttgctttggggtccctcttaaccttgtatttttaaggtctgggactcaccaaccctccccttccaaccagagaaactcactgcagtatctccttgaaagtctggtgacgtgtctgtctaagtgctggtgagaggcacaggaccaactgagggcctcacgcagtacccctgg

SEQ ID NO: 1033 - DNA, 345 bp, Homo sapiens
ccacacagactcaccaagccacagacttgtcttccacaagcacgttcttaccttagccacgaagtgaccaagccacacgtactaaaggttgaactcaaagatatgtacagggtattaaacaaataccaaggggaacagttaacttcaatacaaggtcaaaatcagcaacaagttctacaatccagtgctgatatcagatacaagcttcaaggacaatttcttttcgaaggcttattccagtttcgtgaggctagcatgaggtgtgtgcatttgccaggggcaaatttctattctcaattaacccatgcagcaaatgctacgcatctgctgagtccgtttagaagc

SEQ ID NO: 1034 - DNA, 345 bp, Homo sapiens
ctggtctttaattatgtggttccgaagcaaattccttgtatgggcatcaattggaggggttccatctttgaatacagaattcaggggagccaggagggtcaaccgctcacttccagagagatgattgccgaggccggcttgtctgaaaaggtcaatggctgtggacacatcagactctgcagccaattcaaatagtgtcttggctgagtctgggatgagtagctcatcaatgtagtggatcaccccgttggtggctaggatgtctttattggagatgatcgccttcccgttgatagtgagcatgtccccgctgcagcccacctccagtgtcgtgccctccagggt

SEQ ID NO: 1035 - DNA, 348 bp, Homo sapiens
aaccagccttcggagcgttctctgtcctacttctgactttacttgtggtgtgaccatgttcattataatctcaaaggagaaaaaaaaaccttgtaaaaaaagcaaaaatgacaacagaaaaacaatcttattccgagcattccagtaacttttttgtgtatgtacttagctgtactataagtagttggtttgtatgagatggttaaaaaggccaaagataaaaggtttctttttttttccttttttgtctatgaagttgctgtttattttttttggcctgtttgatgtatgtgtgaaacaatgttgtccaacaataaacaggaattttattttgctgagttgttctag

SEQ ID NO: 1036 - DNA, 534 bp, Homo sapiens
  misc_feature 485: n = A,T,C or G
ccaacatggtgaaaccccgtctccactaaaaatacaaaaattagccaggcatggtggcgggcacctgtaatcccagctactcaggaggctgaggcacgagaattgcttgaacccaggaggcagaggttacagtgagctgagatagcgtcatcgcactccagcctaggcaacaagagcaacactccatctcaaaaaagaaagaaagaaatgtaacctcagacaaaaccagcctagcttatttttatattttcatgatctataacataggaaatatttatgtaaatcacactggtgaaggttatatgtagcacttaaaaatatgaggcttgatttggtcagtgttttcagaggttaaaataataaattccactgacctgggcacattgtgaagtaagctataaaaattccaaataattatctctaaagcaaatcctttgttagttacatggctttacatattaattactctggaaagtttttgaacnctgtttagtagcagatctcctttcttgatagtttcttggtactgccagt

SEQ ID NO: 1037 - DNA, 530 bp, Homo sapiens
aaaacaaacttaactttatttcctcactttcacttaaaacttgattttataaaacacatgaaaaaacatttttaagagttctgtatcacagaacattaaacagtacaaatatccattgcttcataggttcaagttacataaattaaagtcaaataattggaaactgattcaatagggaaaactatacatgaaatgaaggtcaaaaggagctatacagcaatatttcattgtttatagattatgagttactttcaggaccttaacaaagattctgaatatttagacttcctttgttgtattttatacttaaatatctccctacctatactgagtcaaactacttgaccaaaacatctgatttaggaaagcatctagctttatagcacaagtttttccatctacagttactatcttcaaaggaatatacatcacaatgttgacaaaaaaacctcctggttccttttgaacaatgtgcaataaattcatgatgttaactccatggtaagtcaaataggtaccaaaaaaataaa

SEQ ID NO: 1038 - DNA, 235 bp, Homo sapiens
ctgagagcttcatgtccaccagattctgagaggtgtcagcagcactttttttttttatttgttgtttgttttccatgaggttatcggaccatgggctgagctcaggcactttctgtaggagactgttatttctgtaaagatggttatttaaccctcctccaccccatcacggtggccctgagggctgacccggaggccagtggagctgcctggtgtccacgggggagggccaagg

SEQ ID NO: 1039 - DNA, 440 bp, Homo sapiens
aaaaaacccacaaaatgctgattcagttcaaaattaatgcaaatgtttcaaaactgggtttctgatatttgtaaatgtgtttctttattagataagagtgtattaccattaaagtcattagtataatattgctttcaaaaagaaatggtggacaaaactataatccagcatcttttattgcattggaaagactggcaaagtcttttggatgggttgggagatgtggctggaaagtactttggaaaatatacaatcaagatatctcatggcatattaaaagaaaaatcttaatagcagtgttggcttttatttggattttttcatctcagttttttctgtggaatctccttcattggcattgttatttaatcataaacggggcagatgtctacttgttcagtttttcaaatctgttttcctgagtataaataagagtattt

SEQ ID NO: 1040 - DNA, 508 bp, Homo sapiens
ccaagatgaagaaagtcatgcatttacaggatgtagaagtgaagaacgccacacagtggaaggataagataaagagtcagcgaatgagaatcagcacggagttttcaaagctgcacaacttcctggttgaagaagaggacctgtttcttcagagattgaacaaagaagaagaagagacgaagaagaagctgaatgagaacacgttaaaactcaatcaaactatcgcttcattgaagaagctcatcttagaggtgggggagaagagccaggctcccaccctggagctgcttcagaatccaaaagaagtgttgaccaggagtgagatccaggatgtgaactattcccttgaagctgtgaaggtgaagacagtgtgccagataccattgatgaaggaaatgctaaagcgattccaagtggctgtaaacctagctgaagacacagctcatcccaaactcgtcttctcccaggaagggagatatgtgaaaaatacagcatcagccagttcttg

SEQ ID NO: 1041 - DNA, 212 bp, Homo sapiens
ccattctctgcaaccatcagcgagcaacccccagtacgttcgagaagtcgatgcagaatctccagacgaagatccaggcaaagaaggagcaggtggctgaggccagggcagagctgaggagggcgagggctgagcacaaagcccaaggggatggcaagtccaggagtgtcctggagaagaagaggcggctcctggagaagctgcaggagcag

SEQ ID NO: 1042 - DNA, 402 bp, Homo sapiens
aaagcctttttttaggccacattgacagtggtgggcggggagaagatagggaacactcatccctggtcgtctatcccagtgtgtgtttaacattcacagcccagaaccacagatgtgtctgggagagcctggcaaggcattcctcatcaccatcgtgtttgcaaaggttaaaacaaaaacaaaaaaccacaaaaataaaaaacaaaaaaaacaaaaaacccaagaaaaaaaaaaagagtcagcccttggcttctgcttcaaaccctcaagaggggaagcaactccgtgtgcctggggttcccgagggagctgctggctgacctgggcccacagagcctggctttggtccccagcattgcagtatggtgtggtgtttgtaggctgtggggtctggctgtgtgg

SEQ ID NO: 1043 - DNA, 150 bp, Homo sapiens
aaaatcaacaattatggttttcctacacaaaaccccaaccctcccacccaaaaaccctaggtgctacagttccatggcttgccagtaagtagtgtctatgttgtcaaggtctatctttgttccagtagcttgcttctactgcacttttct

SEQ ID NO: 1044 - DNA, 467 bp, Homo sapiens
ccaattgaaacaaacagttctgagaccgttcttccaccactgattaagagtggggtggcaggtattagggataatattcatttagccttctgagctttctgggcagacttggtgaccttgccagctccagcagccttcttgtccactgctttgatgacacccaccgcaactgtctgtctcatatcacgaacagcaaagcgacccaaaggtggatagtctgagaagctctcaacacacatgggcttgccaggaaccatatcaacaatggcagcatcaccagacttcaagaatttagggccatcttccagctttttaccagaacggcgatcaatcttttccttcagctcaacaaacttgcatgcaatgtgagccgtgtggcaatccaatacaggggcatagccggcgcttatttggcctggatggttcaggataatcacctgagcagtgaagccagttgggggccagtg

SEQ ID NO: 1045 - DNA, 543 bp, Homo sapiens
ctgccttggagtcgccctcagcagagatgatggccgcctttttctgttgctcagccttttccaccacaaatctggccctctctgcttcctgctgagccacctgtttggcttccaccgcttctgtgaactccttcccgaaggtcagatgtgtcaaggacacgtcatccaggatgagcccaaaggtggcggctcgctctgtaaggtcgtcgctcacctgcctggagaccagctctctctgggtgattagttctccagcatcaaagcgagccaccactgacttgaggatctcagttgtgatggacggcagcacacgctcatcatagtcctctccgatgctggtgaagatgcgaggaagctggctggcgacaggccggaagaggatgcgcagtgtgatgttgacattctgtaaatctttgctaccagtgatgactggcacattacgtggtcgagaacggcagtcaaagataattggtttctgtacccacgggatgagaaaatgagtcccttcccctaccacaatgtcctgcactccacggaatcggt

SEQ ID NO: 1046 - DNA, 245 bp, Homo sapiens
cctctttttaccagctccgaggtgattttcatattgaattgcaaattcgaagaagcagcttcaaacctgccggggcttctcccgccttttttcccggcggcgggagaagtagattgaagccagttgattagggtgcttagctgttaactaagtgtttgtgggtttaagtcccattggtctagtaagggcttagcttaattaaagtggctgatttgcgttcagttgatgcagagtggggttttgca

SEQ ID NO: 1047 - DNA, 471 bp, Homo sapiens
ctgaaggaacggtgcagaatcgaaccacatactggtctgctcttgctttcagtacagaagagaagcatgtccttccaaggaatcagacaacctgtgaccgtcactgagctagtagattctggtatattgagaccgtccactgtcaatgaactggaatctggtcagatttcttatgacgaggttggtgagagaattaaggacttcctccagggttcaagctgcatagcaggcatatacaatgagaccacaaaacagaagcttggcatttatgaggccgtgaaaattggcttagtccgacctggtactgctctggagttgctggaagcccaagcagctactggctttatagtggatcctgttagcaacttgaggttaccagtggaggaagcctacaagagaggtctggtgggcattgagttcaaagagaagctcctgtctgcagaacgagctgtcactgggtataatgatcct

SEQ ID NO: 1048 - DNA, 410 bp, Homo sapiens
ccagcgagcacatgaagcggttcttcgtgaactttgtggttgggcaggatccgggctcagacgtcgccttccacttcaatccgcggtttgacggctgggacaaggtggtcttcaacacgttgcagggcgggaagtggggcagcgaggagaggaagaggagcatgcccttcaaaaagggtgccgcctttgagctggtcttcatagtcctggctgagcactacaaggtggtggtaaatggaaatcccttctatgagtacgggcaccggcttcccctacagatggtcacccacctgcaagtggatggggatctgcaacttcaatcaatcaacttcatcggaggccagcccctccggccccagggacccccgatgatgccaccttaccctggtcccggacattgccatcaacag

SEQ ID NO: 1049 - DNA, 274 bp, Homo sapiens
aaaattgcaatgacttaaataatgaggttgttaattagagtcagagcctgttcacatattgtgatcaggtagcaatgacatgtaccacttaaattattttatcgtcgatttggtagttcgattttaactactcaatgaaaacagccatgaatatcttttcttaaagagagttttgaaaatgatcacttacctaaaacttgaaagctatgaattagttatccatactctcatgacaattttgttggtgaacaacaaaaaagagatctatttcttt

SEQ ID NO: 1050 - DNA, 511 bp, Homo sapiens
ccttaggactcgagacattttatgacctctcccaataggggcagaggtgagcacccctggtgaaaagttaagactcagtgagtataaatacgccaagaggagctgtggcttctttcactggtgtcctctgtctgcactaagatcccagaagggaggcttgccattattttccttccgatgttcacgttcacagcagggaatgccctgaaagccattatcgccatggatacagcaggaatgatcctgggatggaaattttttgatcatgcggcacatcttgggggagctctttttggaatatggtatgttacttacggtcatgaactgatttggaagaacagggagccgctagtgaaaatctggcatgaaataaggactaatggccccaaaaaaggaggtggctctaagtaaaactgggattggacagtagcggtgcatctggtccttgccgcctgagagccccaggagacatcggctagagtgaccatggctatgctcccgtctggaagat

SEQ ID NO: 1051 - DNA, 264 bp, Homo sapiens
gtggagcaggagcctctacacagcctctggctcttaggtcccagtcatgtttgcaccccctcaaaggggcaggaccagcccttcctttcagtgtccataccaggggccttccatgtgctgatgggtgatgtgactgtggtcagcaggcttgggaagtgctgctgctgtagcttgagttgggctggggtcttggtaggacgctgatctcagaagtccccaaagttcactgtgtaggtctctactgttgtgaaggggaatgcctgg

SEQ ID NO: 1052 - DNA, 409 bp, Homo sapiens
aaactacctcaaaacactttcccatgagtgtgatccacattgttaggtgctgacctagacagagatgaactgaggtccttgttttgttttgttcataatacaaaggtgctaattaatagtatttcagatacttgaagaatgttgatggtgctagaagaatttgagaagaaatactcctgtattgagttgtatcgtgtggtgtattttttaaaaaatttgatttagcattcatattttccatcttattcccaattaaaagtatgcagattatttgcccaaatcttcttcagattcagcatttgttctttgccagtctcattttcatcttcttccatggttccacagaagctttgtttcttgggcaagcagaaaaattaaattgtacctattttgtatatgtgagatgttt

SEQ ID NO: 1053 - DNA, 345 bp, Homo sapiens
ccaatgtggttggtcttcagcttgcagttagccaggttccataccttgaccagcttgtcccagccacaggagacgatgatagggttgctgctgttgggcgagaagcggacacaagacacccactctgagtggctctcatcctggacagtgtatttgcacacacccagggtattccatagcttgatggttttatctcgagatccggagacaatctgccggttgtcagaggagaaggccacactcagcacatccttggtatggcccacaaatcgcctcgtggtggtgcccgttgtgagatcccagaggcgcagggttccatcccaggagcctgagagggcaaactgg

SEQ ID NO: 1054 - DNA, 481 bp, Homo sapiens
aaacctaagcaagaaaatgaactttgaactttcttaatttgggtatctattatgaataccttcacttaagtatttatgaatttagatatgaaaggtaaaactaaccactatccaaattaatatacagttcatttccagaaccctagtttcttccatgtgctcactcgcattcagtattacaacccccaaagataaacaccttactgactgccttctccataaatttgcctgttcttgaacgttatatacgtatacttttttgtatctgttttctttcagtgaagattatgtctgtattatttactcatgttgggtgtagttgtttttttcatcgtcgtataatactccattgtgtgaatgtataaagtatatcctttattatttattgtagataagcctttgggttttcagttttttactaacgggaacattcttgtgcatgtcttagtagacttaggcactcattgctgttgtgtgtgca

SEQ ID NO: 1055 - DNA, 164 bp, Homo sapiens
aaatgtttacgtcgacaaaaccagttagagtaacctacaccacatgcactatacagtagtaagcacaaaattccacagaatgaagcatcacaaagttctgctcagggtggctattccatctaggtgaaatagctgggattttcaattgcctttttcatttgttt

SEQ ID NO: 1056 - DNA, 112 bp, Homo sapiens
ctgttacttcacagctctgacctcagttttctcatctctaactaggtcaccggcacttccctcagggtttgtgagagttaaatgaagtcaagtgcggaacacccagcacagg

SEQ ID NO: 1057 - DNA, 503 bp, Homo sapiens
  misc_feature 366: n = A,T,C or G
ctgtgctcctggatggttttaccacaagtccaattgctatggttacttcaggaagctgaggaactggtctgatgccgagctcgagtgtcagtcttacggaaacggagcccacctggcatctatcctgagtttaaaggaagccagcaccatagcagagtacataagtggctatcagagaagccagccgatatggattggcctgcacgacccacagaagaggcagcagtggcagtggattgatggggccatgtatctgtacagatcctggtctggcaagtccatgggtgggaacaagcactgtgctgagatgagctccaataacaactttttaacttggagcagcaacgaatgcaacaagcgccaacncttcctgtgcaagtaccgaccatagagcaagaatcaagattctgctaactcctgcacagccccgtcctcttcctttctgctagcctggctaaatctgctcattatttcagaggggaaacctagcaaactaagagtga

SEQ ID NO: 1058 - DNA, 474 bp, Homo sapiens
ccacagaagttgctgctgacgctctgggtgaagaatggaagggttatgtggtccgaatcagtggtgggaacgacaaacaaggtttccccatgaagcagggtgtcttgacccatggccgtgtccgcctgctactgagtaaggggcattcctgttacagaccaaggagaactggagaaagaaagagaaaatcagttcgtggttgcattgtggatgcaaatctgagcgttctcaacttggttattgtaaaaaaaggagagaaggatattcctggactgactgatactacagtgcctcgccgcctgggccccaaaagagctagcagaatccgcaaacttttcaatctctctaaagaagatgatgtccgccagtatgttgtaagaaagcccttaaataaagaaggtaagaaacctaggaccaaagcacccaagattcagcgtcttgttactccacgtgtcctgcagcacaaacggcggc

SEQ ID NO: 1059 - DNA, 321 bp, Homo sapiens
gctggctagtgtccccaagatcctgagggaactggtgcctgagaacctcatacgcctgatgtcctcggaggagtggaaaaagagcatccttctagcctatgacaagcataaggacaagacagtggaggaggccaaggtggccttcctgaagtggatctgccggtggcccaccttcggatccgccttcttcgaggtgaagcaaacctcggagccttcctacccggacgtcatcctcatcgccatcaaccgacatggggttctgctcatccaccccaagaccaaggacctgctcaccacctatcccttcaccaagatctccag

SEQ ID NO: 1060 - DNA, 503 bp, Homo sapiens
  misc_feature 408, 410, 411: n = A,T,C or G
aaatggagtccacagactaaaggtcatgttccgagactgaagctttcaaatgaccctagttccaatatagacactttcttcagtttatcagtagcttttaaaagaaattcagaaactaagcggttggagaggagcattggaaatagagggggatgctatgagatgggggttgggagcagagaagaaactgcaggagggcaaagtgtaactagcaatataccttctgtgatgctccagaaacacatgtctgctaagattaacttgattggagtttcttatgaaacaggctgatcatcaagatttttaactcaggtttcagtgaaaaaattggaaacttttacaagaaagatttgagaagtagaaggcaggcagcaaattttccagatattatgcttgcatttcaaattncnngtttcaggcttttcaagtaggcatgcacattcccaaagccatgatatttggctaaatacacaaggaccccagtcgcacaccgtccatctcgc

SEQ ID NO: 1061 - DNA, 436 bp, Homo sapiens
ctgactgtcctctccagaaggctcttctgagctgagcaggagaccccagggccacagccgagccccaacctagacacggtctgagctccaaccttggctggctatacttcaagggcgggtagggccggcatggggctggagggagtcagcccactattgcagattccacacaaagaaggagggggcttgggtggtagcactggacatccatcccatgtgcctgggagtcttggggttggagccacagagaaggttacatcggggtgctgcggaccttgccttcctcctcgggcacattctcataggcattctcatgctcactggacctgaaactggccgccatcgaagagtaccttccatctgttcccaccaggactccatctgccttgtttccgacggtcaggatcatgtgtgcaggctccggctcctacctgcc

SEQ ID NO: 1062 - DNA, 544 bp, Homo sapiens
  misc_feature 442, 488, 511, 512: n = A,T,C or G
ctgtgtgtccatcaacacacaaattcgtaaaaaacacacatggcctcgccatcgtgggtaaaatcggccccacagcacgtctgcaccagcgggccgttactcccatgccgttcttctgtgtaatattaagaactgaatgtgaagtttatagctagcctgggtgtaccttttaagaattttgtaaaccgtttgtctgtcttttgttactgttttatggtgccaagtatcctacgttacaacaataatatcatgggagaaatagaaatagcctagtttgcttccaatagaaactgcttttaacatgggctgtatataaaaatattaaagagaaacaaaactgtacatttcctcattgctccgctacagacaacccatgtcataaccttgttgcaaatatttttctcctatagcagtaagtacagcattagaaggtgattagagngtctgttgatgaaacacaaatgtatgttttattgattttactttanaacactacagatttcctggaccnngtgaaggcattagcttgggtgtttgtgtggga

SEQ ID NO: 1063 - DNA, 379 bp, Homo sapiens
ctgcagcctgggactgaccgggaggctctgattgtttacccaccacaggtaggttgcgtcctgagtctcaggttcacaggtgaaggccacagcatccttgtcctccacggggttggagttgttgctggagatggagggcttgggcagctccgggtatacatggaactgtccggttgcttcttcattcacaagatctgactttatgacttgtagggtatagaatcctgtgtcattctgggtgacgttctggatcagcagggatgcattggggtatattgtctctcgaccactgtatgcgggccctggggtagcttgttgagttcctattacatatcctacaattagactgttgccatccactctttcgcctttgtaccag

SEQ ID NO: 1064 - DNA, 240 bp, Homo sapiens
ctggtcctgcagacaggtgctcttgtcctgagtgacaacggcatctgctgtatcgatgagttcgacaagatgaatgaaagtacaagatcggtattgcatgaagtcatggaacagcagactctgtccattgtaaaggctgggatcatctgtcagctcaatgcgcgcacctctgtcctggcagcagcaaatcccattgagtctcagtggaatcctaaaaaaacaaccattgaaaacatccag

SEQ ID NO: 1065 - DNA, 533 bp, Homo sapiens
aaaaaaggcatttggagaaactggtagatgtcttcaacatatagttcaaataaattagttgtatgtgtactactgaatcctctttcaacctctcttgcattccaaataaaatcttagtgcaaacatcaaagttgctggtcactccaaaagactgctaaactcataatagaatacaagatctgaattactgtgtattaagtaggaaaacccaagaataccagttactgcaaaattcatttaggcacatttaatagtccactctaagcattttttctaagtctctcacattaatgactaaagcctgtttacagtactaaaattctatcattcaagcatcaatgattacatttcagaaaaaggaaattcatttcagtaatagcattactgctatatcctaaaaaaaggagagaaaataaagaatcataattaacaaaaccagtatccataataggatacacagggaaaaacattttaggagaaaaaaaagtgtgctttacttgccacagcaggaattatataatgtaaacaccata

SEQ ID NO: 1066 - DNA, 496 bp, Homo sapiens
ctgatgtttgaaatatctgtctacatttaattagatgtgttgtatttaccaaggaggcacaaatatgtagttctgtagattttaatactaacttttccagtaagaaaaataataccaggtgatttcaaaaagggcagtgatctataaacactcaaaatgcatctttgaacaggggagcagaaatagctaatttaatgaaaacaaaccttaagcactttacttggcttctaataagcatcccaagaaaaggtacctgagaggggttgacaagtacactgtgtctagaacagccaagatgttgccaaagttttatgctttgaatttcctaaatatatagctagcagaaacatatgccagaaatctactgatgctaggaaaatatttttgtcagcattttgtaaaatctctaactttcaaccaatatttctgttcataaatcttccagtgaaaatgtctgaaatatattacatgtaacaatgaagcaagattaatttta

SEQ ID NO: 1067 - DNA, 517 bp, Homo sapiens
  misc_feature 456, 486, 507: n = A,T,C or G
gcaggtccaaggatatcaaaccttaaactcagaacatggcaggtgagtaaaagttgaccctatttttcaaataaaagatcagtgttctcaaaacttacatatgtagtcttcttaaacagctccctcctccctccaaacaaactaccttgctggtccagcctgaacaacatgcacaaagactttggctcccctagaacaagccattgagccttcctcttgagataggggcatcaagaataaggattcacatgtttattcacaactcaggctcctcaaggggctgggatctccccaattagactcctttgtttcactatgcccacaatctcagaggtgtttgaaattgtctgtactagggaagaaaggattttcaaaaatagccagtcacacagaacagctctggaccaagccattacccaatcccggatgggaagttgcttcacgtttctcttaagntgttacgcagcattgccatggcagcaaaangaggttaaccattaaggaagnacctgttcaa

SEQ ID NO: 1068 - DNA, 112 bp, Homo sapiens
  misc_feature 90, 106: n = A,T,C or G
ctgctggagtcggaactgctgcctttgtttggcggccttgtttcttaaatcagttccctcttaggatttattacactaaaaaaaaattantttttgaaaagaaatnggagaa

SEQ ID NO: 1069 - DNA, 513 bp, Homo sapiens
ccttaggaatcatacagagagaacttaaataaggctgacccttgggcagatttgtagcccaggttagtataagaaaggtagtcaagaaatctcaagccatgaatttagtttcaagttttctggatgagtaggactcctaagtgcctggcagaagcaaatataaatcctccccagaggaagacagcttcatctttgcccgcagaggatctccataaataattgctcaagggcagccggcagcagtcagtcaaagctggagtcaatccaccaggtgacagggcatcccaaggaaaaactaggagggaaaaaagcctagtaacagaccctcacacccctcagagattagttatgagatatgaattataaagcaagtatgcttactataggtaaagaaataaaagataaaccaggaaatatctgcaaggaataggaaactattaaaagtggcatagcaaattttatgaggaacaaaactgaattgtaagaaatgaaaacacagtaattgaacaattt

SEQ ID NO: 1070 - DNA, 74 bp, Homo sapiens
cctgctacttataggcattacttcatttttccttatgaagggtactataccaacacagactttatagtatgttt

SEQ ID NO: 1071 - DNA, 509 bp, Homo sapiens
ccttcttatttagattccttttgatgtccttccattttcagatatacagttgcttttttcctctgggttttgggaagggcacctctcacatgacgatcttatggcctgcttctggggaaaaggatggggaaatgtcagagagtccttgcatatatcatctctcaaaactcttaatcttaaatattcagtatgtcaaggtgccatattttggggtagcatgtcctgagctccatcaacattaatgtaaaaatatttagcctaatgcctggcacatatcaagagcttaagaaatgctgactctaaaattatgacatctaggaagatgtggggcagaattgtaaacttacctgctaaattacctatgagctgcccaccattcgttaattatggcaataataatgggtttatcatgctgtatcctcactcttgcaagcagtgttccttgtgcttagcagtaaatgttgcctaatttggggcatgctggtgtgtctgcagactgttcttgtatg

SEQ ID NO: 1072 - DNA, 563 bp, Homo sapiens
ctgtcactcgaagaataccattcacatctatctcaaaggtgacttcaatctgtgggaccccacgaggagcaggaggaattccagtcagatcaaatgtacccagaagatgattgtcttttgtcaggggtctttcaccttcatagaccttgattgtaacagttggttgattatcagaagctgtagaaaagatctgagacttcttggtaggcaccactgtgttccttggaatcagtttggtcatgacacctcccacagtttcaataccaagtgtaaggggacatacatcaagcagtaccaggtcacctgtatcttgatcaccagagagcacaccagcctggacagcagcaccatacgctacagcttcatctgggtttatgccacgggatggttccttgccattgaagaactctttaaccagttgctgaatctttggaattcgagtcgagccaccaacaagaacaatttcatcaatatcagacttcttcaaatcagaatcttccaacactttctggacgggcttcatagtagaccggaacagatccatgttgagctcttcaaatttg

SEQ ID NO: 1073 - DNA, 410 bp, Homo sapiens
  misc_feature 321: n = A,T,C or G
caaaaccccactctgcatcaactgaacgcaaatcagccactttaattaagctaagcccttactagaccaatgggacttaaacccacaaacacttagttaacagctaagcaccctaatcaactggcttcaatctacttctcccgccgccgggaaaaaaggcgggagaagccccggcaggtttgaagctgcttcttcgaatttgcaattcaatatgaaaatcacctcggagctggtaaaaagaggttttgtacaagctttttttttttttttttttttttttttggaaaaaaaaatgggtagtgtatattttgcaggtttaanacaactcaggacaataaaaacaatggactttacatgtgtatatatatagctctcttaggcaccataatcagtatgagccaacaatattt

SEQ ID NO: 1074 - DNA, 499 bp, Homo sapiens
gtggaagcaggtgtgagagggtccagcagaaggaaacatggctgccaaagtgtttgagtccattggcaagtttggcctggccttagctgttgcaggaggcgtggtgaactctgccttatataatgtggatgctgggcacagagctgtcatctttgaccgattccgtggagtgcaggacattgtggtaggggaagggactcattttctcatcccgtgggtacagaaaccaattatctttgactgccgttctcgaccacgtaatgtgccagtcatcactggtagcaaagatttacagaatgtcaacatcacactgcgcatcctcttccggcctgtcgccagccagcttcctcgcatcttcaccagcatcggagaggactatgatgagcgtgtgctgccgtccatcacaactgagatcctcaagtcagtggtggctcgctttgatgctggagaactaatcacccagagagagctggtctccaggcaggtgagcgacgacctt

SEQ ID NO: 1075 - DNA, 448 bp, Homo sapiens
ccagtttggagaacgcgctgacatactgctcggccacagtcagtgaagctgctgcatctccattatgttgtgtcagagctgcagccaggattcgaatagcttcagctttagccttggccttcgccagaactgcactggcctctcctgctgcctgatttatctgttcagccttttctgcttcggaggccaggatctgggcctgtttcttcccttctgccacattgatggccgactctcgggtcccctcagactctagaactgtggcccgtttccgccgctctgcctccacctgcatctgcatagactctttcacccggggtggcacatggatatccttgatctcataacggaggcagcggataccccagcagtcagcagcttggttgatggcatccacaatgctggcattcagggactcccgttcccggaagactttgtccagagagag

SEQ ID NO: 1076 - DNA, 217 bp, Homo sapiens
ctgtggatttcaaaacacagtgtattctagatcatctaagatccatgctgatttttattgcacaagaattaggtttgaactcttgagctggaacctcagcaaactagagtatatattgttcagtatttctttggaaacatttcattaatgtacttgtcttacagaaatttctgaactttagtaaaaaaaataaagttaaacttttaaaactcaaaaa

SEQ ID NO: 1077 - DNA, 254 bp, Homo sapiens
ctgcctatttccacatctttcaatccatctggctccttaaataggggaaaaagcccttatttggtggagaagcatttccaaaatgaagttacaggttctattaaaacttactgtcacatcaactgttaaaatagggccttttgtgttttgttatttcaccttaatatcaccagaattcctgtaattccacaattgtgattttactatgtagaagataattcagttctagtctattgctttagatgtaaaaacag

SEQ ID NO: 1078 - DNA, 354 bp, Homo sapiens
ctgtccctggatagtgccacctttgcctctccccaggattttgggcttgttttgcaaacactcaaagagtacaacctagccctgaaaagactgagcttccatgacatgaatctcgctgactgtcagagcgaggtgctctttttgctacagaatctgactctgcaagagattaccttctccttctgccgtctgtttgagaagcgcccagcccaatttctgcctgagatggttgctgctatgaagggcaactccacactgaagggcctccggctgccagggaaccgcctggggaatgctggcctgctggccttggcagatgttttctcagaggattcatcctcctctctctgtcag

SEQ ID NO: 1079 - DNA, 563 bp, Homo sapiens
  misc_feature 472: n = A,T,C or G
gcacagagctgtcatctttgaccgattccgtggagtgcaggacattgtggtaggggaagggactcattttctcatcccgtgggtacagaaaccaattatctttgactgccgttctcgaccacgtaatgtgccagtcatcactggtagcaaagatttacagaatgtcaacatcacactgcgcatcctcttccggcctgtcgccagccagcttcctcgcatcttcaccagcatcggagaggactatgatgagcgtgtgctgccgtccatcacaactgagatcctcaagtcagtggtggctcgctttgatgctggagaactaatcacccagagagagctggtctccaggcaggtgagcgacgaccttacagagcgagccgccacctttgggctcatcctggatgacgtgtccttgacacatctgaccttcgggaaggagttcacagaagcggtggaagccaaacaggtggctcancaggaagcagagagggccagatttgtggtggaaaaggctgagcaacagaaaaaggcggccatcatctctgctgagggcgactccaaggcag

SEQ ID NO: 1080 - DNA, 506 bp, Homo sapiens
  misc_feature 482: n = A,T,C or G
aaaacttggagaagctggctgggcgcggtggctcacgcctgtaatcccagcactttgagagaccgaggcgggcggatcacgaggtcaggagatcgagaccatcctggctaacacggtgaaaccccatctctactaaaaatacaaaaaattagctgggcgtggtggcaggcgcctgtggtcccagctactcgggaggctgaggcaggagaatagtgtgaacccgggaggcggagcttgcagtgagccaagatagtgccactgcacttcagcctgggtgacagagtgagaccctgtctcaaaaaaaaaaaaaaaaatcctggagaagccagaacaatatacaaacaagtatgtggaggcagatttgctttattccaagaggctgtttgagtgtgtgtctgcctaagcctccttatagcctatttttctacttgctgagagagtaatattaaaggaacagtgagggagtggaaggagagccttanttagagcgttcccatttctggcct

SEQ ID NO: 1081 - DNA, 462 bp, Homo sapiens
aaatttaagatagtttgtaagaactgtacaaaaaaatgcttctggagatttctttggcagaaatgcctttcatctataatttcatggagaactgctttaattagcctaggtgaaaagtagtcctagcagtgtaaatatgtataattagagttttctaatttcactgtgagatctctaacttttgagtggcaaacagatcaagtcttttgctcatagacttttctgtggggttattaaaatgcaaaagctttattttttttaataatgccatactccattagtgtcagatgatggtatggaatttgttcccttgctttcccccactgttactgcttcagtttatagattgccagcagagttcagaaatagagcagggatttacccgttctttgcttggacatcccattttcttttgtccagacccatgttggcaatcatgtatgaactgtgttatacttctca

SEQ ID NO: 1082 - DNA, 279 bp, Homo sapiens
aaataccatcctttgtctccgttaaaagattttcatccatttattcaaaaaccttttaagttcaactgtccaatttaagacagagtgaagacatttttgagtatctgaactaagcattgtcttgactgaaacgaagtaagaactcaatgagagtccttgtgggcctcccagtcatgcctttccgtagatagggaacttcatctttgttggtcatcacgcctgctatgtctaaatgtgcccacttaggatgagttacgaattctttcaggaatgctgcag

SEQ ID NO: 1083 - DNA, 328 bp, Homo sapiens
gtggaaagtccaacagatgccccactcacaagatagggccctccaatcagtcttctggctccctttcactcatagtaactggttgctcttcctattggtcatagataaatgacacctgcacaattctccgagtgctttcaagcaacttcgggaggcagtgactaagaccctttccttgcccccagcttcctatgtcccagggctgcctgtggcacctggactgctgctgcccctgggtcccgtacattccagggcaacaatggaggaagggcaggcaacgcatgaggaattaacagtctttattgggctcagaccaggagtccgtggg

SEQ ID NO: 1084 - DNA, 458 bp, Homo sapiens
  misc_feature 415: n = A,T,C or G
ttttttttttttttttccattcctagggggaatgggccccaaggttttgtttttttatttcgtttttggggtacaggtggtgtttggttacatggatgagttctttagtgatttctgcgactttagcgcacccatcacccgagcagtgtacactgtacccaatatgtagtctttcatccctcaccccactccaagatttagttctgccagacgatacatgttgccttcacttctttttagtttatttgcctggacccatctaagtcatacttaaaactctataaagcattttttttctttgaaatggtctcagctccttcttgatcctctccattttccacccaatctcctctatccctctccctttactgcctgaaatcggctgtagatgtagcagtttctggaggaaatgaanatttgtggtggttctttccagtcaccaggttgtgaaagtctta

SEQ ID NO: 1085 - DNA, 581 bp, Homo sapiens
  misc_feature 550: n = A,T,C or G
ctgcaaggattcagcaccagttatgtttgaatgaaccctccttttctctgagattctggtccctggaaatccctttctgctagtggtgagcatgtaagtgttaagtttttaatctgggagcagggcataggaagaaaatgtcagtagtgctaatgcattttgcactagaacgcttcgggaaaatattcatgcttgccatctgttcatttctaaatttatattcataaagttacagtttgatacaggaattattaggagtaattcttttctgtttctgtttataatgaagaacactgtagctacattttcagaagttaacatcaagccatcaaacctgggtatagtgcagaaaacgtggcacacactgaccacacattaggctgtgtcaccattgtgtggtgtacctgctggaagaattctagcatgctacttggggacataatttcagtgggaaatatgccactgaccgatttttttttcctctttgcagtggggctaggacagttgattcaacaaagtatttttttcttttttctcagtcctaatttgnacaggtcaaagatgtgttcaggcattccagg

SEQ ID NO: 1086 - DNA, 127 bp, Homo sapiens
aaaaacacacctcaccaagctcagccaccagcttaaaaaggactggacaatacttttaccactttcccttctcagaaatcaggcctgtcctcagaatgttacaaggtacagcccatttaagctcttt

SEQ ID NO: 1087 - DNA, 453 bp, Homo sapiens
aaaggttaatttgtagaacaaatgttttaactatactttttttctactctatactccccagttacaatatttacaaagggctgaagtctatataaaaaaatgatctttggctgggcatggtggctcatgcctgtaatcccagcactttgggaggtcgaggcaggcggatcacgaggttaggagtttgagaccagcctgaccaacatgaagaaaccctgtctctactaaaaatacaaaattagccaggcatggaggcaggcgcctgtaatcccaactactcgggaggctgaggcaggagaatcgcttgaacccgggaggcggaggttgcggtgagttgagattgtgccattgcactccagcctgggtgacaaagcgagtctcaaaaaaaaaaaaacatcttttactttcccccatccctcattttagtcaaacttctcccacctcatttctgcc

SEQ ID NO: 1088 - DNA, 321 bp, Homo sapiens
ccagcggctggtaaggagccagggcttccaggtaggagaagtctggttccgtgaatatgacggtattgagactagattttccccagagctccatgaagtggaccacgtccccgaagcggagggaagggtgcccggtgaacaccacacagggctgtctaaagtcgttgctgaagtctccgtggatgctggggtagtgcttcagcttattggtctgaatgagctctgcatgaggaaaaggtggttctggaagatacaccttactctgtttgttgtgacaaagccactcagcaaagatctgggaaaactccagtgaactgttgg

SEQ ID NO: 1089 - DNA, 409 bp, Homo sapiens
cctgtggtgtaggggactgaattttttttttaacttctattccattttaattgtaggatatctttgtccatatacccaggtgtcctgatttgaatgtactatttgatcctcattgtgttcaggcaaaaaataggaaatgagtaattttgagtttgaaatctctcccagaagacaaactacttcagtgagtaaaagctttgacattttatgttttattcataaagggggttaattatttgctacaaagaagcacgatctattttcatcatcgatttgaaaatatctgtaactcctatagatcctataggcagagagttttcctttctgactttttccctttgctttcgtgtgaccacatgttttctgtaccagtcactggggaaagaagtgagtttatctcgtttgtttt

SEQ ID NO: 1090 - DNA, 281 bp, Homo sapiens
aaactcaagactggctccaggagagaggaggacggacactaggttgaggggccaggccacactcactctggaccacctgttgttcccgggtcaagttcccagggtcacaccagcctgcctctgcaggacaagaggaccaagctgcccttgagtggacactgtgaggctggggctcgtggtagctcttcacatggaccaaacgggaaaatcaggaaagctggtagtgcctggagcttcactcccagccagggcagcacctctggcctctaaggagaaaggcc

SEQ ID NO: 1091 - DNA, 479 bp, Homo sapiens
agggcctcctgcattccgtttctctggccggaagggtctagtgttcatccctctcaggctttggcctcctcccactctcccgccctggggcccattcgtttaggaagaatgggagagccggtcgtggcccctgggcggggtaaaggagggaggcttggtaaacctctgctggggaggacccagtacagtggcagctccttgtcggggaaagaacggatctggggaaagaacggatctgcgtcacacgctcttacaggggaaccctaaggggcctgaggggtagggcttggtctccacccagagggaaggagaaatttttcgagtcgtaaagaaatgtatcagaagccatggaacatttacagccgcacacgctgggtctcccaacaaacagatccccaaaatattttccagtgctgtactcgtggcatagacccagacccacagaccaggaggaagcgctggagatgtcaacagccaac

SEQ ID NO: 1092 - DNA, 520 bp, Homo sapiens
  misc_feature 490, 510, 519: n = A,T,C or G
aaagcatacatgagatagtatctttcatttagtcctaagcttgattatttatgctcattgtaatatttcagtgacattctggacataaatttcaagtatatcaccatatacttattgttaaatatcaaacaaagctactgactgtgagggaaaaatttcagtgattttttttgtttgtttttttgttacttaccctgagatactcatcccacagtatatctgagatttagctgaacatttacaaattttaacaaattttttttctttccattgcatgcatcgatatgccaaattctgcacttcaatccaggtaaaataatgatagtgtttgtaaaccagatagtgaaaaccagtgtgttttctaatactgcccatgatagacagagtgaaatcacagcataaacagtagccaggaacctatactgcaaacatttggcttcaagtatcttgcaacaaatagctactaatatgaccatacacggtacatagnacaccacagtcctggattgnagcatgccng

SEQ ID NO: 1093 - DNA, 432 bp, Homo sapiens
  misc_feature 429: n = A,T,C or G
ctgatctacgagtctgccatcacctgtgagtacctggatgaagcatacccagggaagaagctgttgccggatgacccctatgagaaagcttgccagaagatgatcttagagttgttttctaaggtgccatccttggtaggaagctttattagaagccaaaataaagaagactatgatggcctaaaagaagaatttcgtaaagaatttaccaagctagaggaggttctgactaataagaagacgaccttctttggtggcaattctatctctatgattgattacctcatctggccctggtttgaacggctggaagcaatgaagttaaatgagtgtgtagaccacactccaaaactgaaactgtggatggcagccatgaaggaagatcccacagtctcagccctgcttactagtgagaaagactggcaaggnttc

SEQ ID NO: 1094 - DNA, 104 bp, Homo sapiens
aaaagaaacgatcaatactaaatattagcagctaaaacatcattgattcttgtggctttagaactttcacacactgagagctccataagaggaaaaaagcaaag

SEQ ID NO: 1095 - DNA, 419 bp, Homo sapiens
atgaggtcaagtgatcgagaccatccttgccaacatggtgaaaccccgtctctaccaaaatacaaaaaattagccaggcgtgacggtgcgtgcctgtagtcccaactactcggaaggctgaggcaggagaattgcttgaacccgggaggcagaggttgcagtgagccgagatcgcaccactgcactccagcttggcaatagagtgagactccatctcaaaaaacaaaacaaaacaacaacaaaataaactactgtggcagcgttggtaccctgcatcactgccatggttgtgctattctcatctcaacatagaattggtgggttctcctaagggtgtcaggaacctctaaaaagatgtgattctttgggaggggatatttgaaattccaacttccattccccctagcaaaaggaagcag

SEQ ID NO: 1096 - DNA, 112 bp, Homo sapiens
  misc_feature 47, 48, 63, 68, 79, 83, 102, 104, 106, 107: n = A,T,C or G
ttttttttttttttttttttttttttttttttttttttttttttttnncccttcctccaagtnttttntttttttttgngttnttaaaaaaaaaacaaaaancncnnccaaa

SEQ ID NO: 1097 - DNA, 202 bp, Homo sapiens
ccagggtctggaagggccctgggagcgcccaccccctctggatgagtccgagagagatggaggctctgaggaccaagtggaagacccagcactaagtgagcctggggaggaacctcagcgcccttccccctctgagcctggcacataggcacccagcctgcatctcccaggaggaagtggaggggacatcgctgttccccag

SEQ ID NO: 1098 - DNA, 491 bp, Homo sapiens
aaaaagtcagtatcatctctcttgtggagctaccagaacaggtttttcaaacagaaaaggggaacaaacgtggggaacaaacgtggggcgcttggctatgttaagaattcttatcactagaatactgcttcgagacgttcatagtactttccaaaagaagccacccacctcaaagagccctgcgcagccccagtgacccatgagtgtggcagccgtcattttattagccactgttggcaatcatcaaagtattcactcagagtggggaaattacttaatatcaacgatattaacgatttccatgtatttagctttgtgacacacaatgcacaagggtcttcaaatgtttgttttttacaccagtggtagaaaattgtcattcttcggattcaacacactggtggatgacactttagtgaagtgtgactacctagaagagcaggaaggcagctcctgattctgactgggccagcctcttccagaaggtgact

SEQ ID NO: 1099 - DNA, 218 bp, Homo sapiens
ttccagcctgcgacctgcggagaaaaaaaattacttattttcttgccccatacataccttgaggcgagcaaaaaaattaaattttaaccatgagggaaatcgtgcacatccaggctggtcagtgtggcaaccagatcggtgccaagttctgggaggtgatcagtgatgaacatggcatcgaccccaccggcacctaccacggggacagcgacctgcag

SEQ ID NO: 1100 - DNA, 199 bp, Homo sapiens
cctagagagctagagaagcaagtaagggccagggccagagtcggcttcaatggaacaacagcccagtgccctaaggcccctaactcttgctggctgtttcttgaccccaagccagggttgggagtcctctgggcatccattttttctaaaggaactggacagagtacacacaggaaaggaagctgtcaccctcttgcca

SEQ ID NO: 1101 - DNA, 222 bp, Homo sapiens
cctcggtgggtcttgcggggcagcttcttggtgtgccaacgactggtgacccctttgtagcctttgcccttggtcaccccgatgacgtcgatcatctcatcctgcccaaacacttggttcacaggtacctgctgctcaagcctctcgcgggcccagtccagcttctcggccacagtgcctccgttcacctggatctccatcaggtgggccttcttctggcgc

SEQ ID NO: 1102 - DNA, 235 bp, Homo sapiens
  misc_feature 16, 27, 113, 162, 197: n = A,T,C or G
aaaatgtcaaagtatngctatacatanttgcacttttctgctaggctgggctagtatcttccatggcaagatcctcaaactactgaataaaatacacttttaaatcaatatangtacttgattaatttccctgaaattatcaacatcattaccaaaatcttncaggattttgtaagatttgattccttaaatacagntcctaaagttaaacttatggagggaaaaaaaccctcat

SEQ ID NO: 1103 - DNA, 321 bp, Homo sapiens
ccagcggctggtaaggagccagggcttccaggtaggagaagtctggttccgtgaatatgacggtattgagactagattttccccagagctccatgaagtggaccacgtccccgaagcggagggaagggtgcccggtgaacaccacacagggctgtctaaagtcgttactgaagtctccgtggatgctggggtagtgcttcagcttattggtctgaatgagctctgcatgaggaaaaggtggttctggaagatacaccttactctgtttgttgtgacaaagccactcagcaaagatctgggaaaactccagtgaactgttgg

SEQ ID NO: 1104 - DNA, 493 bp, Homo sapiens
ctgagttacaagagaaaatgatcacatgcatcagaggcttggagaaagctaaagtgattcagccaggctacggtgttcagtatgattacttagatccccgtcagatcaccccttccctggagactcatttggttcaacgactcttctttgctggacagatcaatggcaccactggttatgaggaagctgcagctcaaggtgtgatagccggaatcaacgccagtcttcgggtcagtcgcaagcctccctttgtggttagccgaacagaaggttacataggagtcttgattgatgacctcactactctgggcaccagtgaaccataccgcatgtttaccagccgagtagagttccgtttgtcactgcgccctgataatgctgacagccggctcacactgcgagggtataaagacgctggctgtgtgtcccaacaacgatatgaaagagcttgttggatgaagtcttctttagaagaaggcatttctgtgttgaa

SEQ ID NO: 1105 - DNA, 194 bp, Homo sapiens
  misc_feature 156, 189: n = A,T,C or G
ctggtgaaggaactcaaggaggctttaggtattccagccgctgcctctttcaaacatgtcagcccagcaggtgctgcctgttggaattccactcagtgaagatgaggccaaagtctgcatggtttatgatctctataaaaccctcacacccatctnagcggcatatgcaacaccaagaggggctgatangatgt

SEQ ID NO: 1106 - DNA, 337 bp, Homo sapiens
ctgcacggaccaggttcccgcaaaacattgccagctagtgaggcataatttgctcaaagtatagaaacagcccacctgtgcccactttgaccattggtgaggatagatataaaatcacttcttccaacgaagcctaggtgaaaatctatttataaatggaccacaactctggggtgtcgtttttgtgctgtgacttcctaattattgctaaagaactactgtttagttggtaatggtgtaaaattacattcagctccttcttgtcatataaaaggaatttggagggtgtcgcttaaaattttattccacctgtacatttgtcactttacctcggccg

SEQ ID NO: 1107 - DNA, 342 bp, Homo sapiens
ccatatggtagagatgagggaaggatggactagaagcaagctgggtcttctgggtcgtctctactcctttttcacttcatcaccgttttccccactgagcttgaacacaggaatctgctgaccatccttgagctctaaaaagacctcgtcaaggtgccacctctgaaaggggccacctctggatgagtggacgtagagaaggccctctgatttggatccagagacaggaatcttcaacttggcatcaacaatgtccacgaagttttccctgtcgatgagcttgagataatggatgttgagaggagggcccagagcttcctgtgcctcgggatggctctgcag

SEQ ID NO: 1108 - DNA, 549 bp, Homo sapiens
aaattgcaaattaaagcatgtatttacatatttatatacaaaaaacttcaaaaacaaattaatccaaatcttggtccaagagtttccactttataagtggtatggtactatgctatatatatcctcttccaaaagtctcttaggacttggtaagttccaaatattcattcacaaatggttcccctttaagcttaatgaaccatatacttcatttctgagtaaattagaggaaatattacagaacacgctttgtacaatacagcaccactactgagaagggctcgaggttttgtaatccaaggttctgacttaaagcaaaaatacacggcatagattgcaacagcaaagaagtgtccaattaaaactagagggttaggagacaatacagaaagcagcccaacaggacccgcaacacattcgccaccaagtttgaaataaagaaaacaggcttttcttagttgatgcagggaatcatctgtggcagaaaataattcataaagagcctgagcaaggatattcacgacaaaggaatgagatgtttttcttgcc

SEQ ID NO: 1109 - DNA, 250 bp, Homo sapiens
ccaaactattttgaattttgttgtccggccctcagtgccctgccctctcccttaccaggaccacagctctgttccttcggcctctggtcctctctggtcccctcctgggtttcttacgtagttgatttttcctctttagtctcccccgacctgcgcccagccccgtggcccctgcccctctcctactctctgtggcagtttcatatttgctaagacgaatttgctcattaaacattttgttgtattttac

SEQ ID NO: 1110 - DNA, 544 bp, Homo sapiens
aaatcagtagtctaacaaggattagaaaagacaaaactctgttcagtgtttctgacaaagtagaaagggtgaaaacataaataaggctttaatttggcaaaatataatacaatgccttttttatcctcaaatgaacagtttcccaattacttcactctaacacctggtagtgctctttctcctttgtgagctgttggtttaccgcctgaagcaactgctgtaactgtgttacagtctgatttagacttacagacattgtctccttctcagaagactccgtttctggggaaacatcactattttcaataacagtagtgtctccagcagcttttactatttttgactggataagctccagtgactgttgagccttatgcaaatcaccagctaccttctgtctttcattttgttcagttctaagttttgtgagtgtttcatttaactgtgccttcaactctctgacttctgtaacataggtagatcgttccatctctgccttttctagttccatttccaaatgttctcgttctcttctcagattttc

SEQ ID NO: 1111 - DNA, 402 bp, Homo sapiens
cctcaaagaggtggagagacttatccaagaacgtggctgggagttcatgtggaatgagcgtttgggatacatcttgacctgtccatctaacctgggcactggacttcgggcaggagtgcacatcaaactgcccctgctaagcaaagatagccgcttcccaaagatcctggagaacctaagactccaaaaacgtggtactggaggagtggacactgctgctacaggcggtgtctttgatatttctaatttggaccgactaggcaaatcagaggtggagctggtgcaactggtcatcgatggagtaaactatttgattgattgtgaacggcgtctggagagaggccaggatatccgcatccccacacctgtcatccacaccaagcattaactccccatcgccag

SEQ ID NO: 1112 - DNA, 363 bp, Homo sapiens
cctaagacaatgaaaggaagccagagcaacagaccaccttgggatccggggagaagggtaaatgggcaaaagggttgtatttcctgatgctctcagaacatcagaccacaccatgtgaatttaagcaggactattttaagtggggaaacaatactagaagcatttggtgtattttcctggcactcacctcctaggtaagcaggagagcgggacactcaggagttgtgactaaactcacacttaagctgcctgtccagaccgtccccttggctgaacacaacactgaaattgtggcagtgtctgttgccccagtggacctcccacttactaatgagtatgtaaaacagaggagccacagtgagg

SEQ ID NO: 1113 - DNA, 223 bp, Homo sapiens
aaaagacctttagtccgttctacttttcttgaagagggaggaccgtaagggatataaaggtttcactgaatactaagagcctgaaaaactgcttggctgatttgactaataaaggctggtctgttatcagactgtatagaggtgggaaggctaaactgaggaattgtgtctgacagaagggaagaaatgactgtggtgaccttctcagaccctgtaggaaagg

SEQ ID NO: 1114 - DNA, 452 bp, Homo sapiens
aaaacttgctttgtttagaattcccacctcatttttccatggacaaaagtattctttatgtcctagtgcacttacaatttggtattacctgggagtgaaaagaaatattacagccatgcctaactgacttcttgaggtaagattgttctgtcagaaaaccctctcccagttcccctgcagctcttcaggaatccacatctctccagagctctttgttctcatgggtggcacctccagagtgaagaagatcctttgtcaagaagggaaacagaggggaaatgagagggtcctgcaggcagagctggaatcaacttccactctgcctcttgcaagctgtgtgaccctgggcacaatttctccttcctctggaaacctctgttttcttagatttggagcagggtggtcacactgaccttgcagagttctgagaatcagagacagaacataaaagg

SEQ ID NO: 1115 - DNA, 367 bp, Homo sapiens
ccagttgggcagctctttccacgatggctttgcggttcttggaggaaacattgtgagcaatctcggcacagtaagatttgttgcacatcagcagcacttccagctccttgacgttgtggaccaggaacttccggaagccactgggcagcatgtgctttgtttttttgttgcttccataaccaatgttgggcatcaagatctggcccttgaatcttctacgaaccctgttgtcaatgcctctgggtttccgccagttacgcttaattttgacatatcggtctgactggtgccggatgaacttcttggttctctttttgacgatcttgggcttcacaaggggtctgagggcggccatgatgccgagaag

SEQ ID NO: 1116 - DNA, 387 bp, Homo sapiens
ccataaaggaggtaaaaatgaaaaccataacctaacttttatagaggctttatctttaatttaacgatgtgcggaggactttcttgcttgaatctgttccgggctgtctgctctgtccatcaaatgggcaggtctggaatggggcaccttcggccgttcagaagtggcctgaacagaatgctggaacccaggctggactcggacacactaaggttttgattttgaatttcagccttattagaagatctaacctaagagtaagctaaccacagggattcttttgtagaacactttttatgcagatgaagctattttttccagcaagtagattcttccagtttttccaaggagtaatttccccgaattggcataccacggcgtggacag

SEQ ID NO: 1117 - DNA, 316 bp, Homo sapiens
cctttgtccggcaccctgcccacaggctgagctcagccccaggccctttcaggcatctagacactcccatagcctgtcaggctggggcaaggagatcccaggtcacacatactccttggaagagttggacttagggtaagagcggggtgcacggtacccagccttgctctcattcccaggacaggaacaggagagcagtgcacctcccaggatgactagggcagaccctgcccagccaataaagatggcagggccaaactcatacttaatgttggtagggatcaaagggttataaaagtctgtgacaatctgatgg

SEQ ID NO: 1118 - DNA, 448 bp, Homo sapiens
ctggcaaagataatgcttctgctgggctgaaacccatctgaaagagaaaaaagttagctttacctgaggaaaggttatacacagacaaggatggaaggtatcccacttaagatgaatcagaaggtctaattccaagatagcggattccaaaatcttttttttctgagccaaaaaagaaaaaaaaaactaacaaaatctttttttgagaccccaggtaaaagaataaaagaataggaataatttttttttaagtaacctacaaagagcaagataggagatctgcaaataagattttgagtacatagcaggggccagtagtcaccctttcacaatttcattcttggagttccttaacttctggacccagagatcattgaaaacagtgtaagcatgatgatgcacatcttgagaaaaatcttcagaggtaaatccaaacattgggattttt

SEQ ID NO: 1119 - DNA, 473 bp, Homo sapiens
  misc_feature 447: n = A,T,C or G
cggccgaggtaaaaaaagctgagggtgattagacaagttgacaagttgttttgaaagaggtaactggcttagtacaaaaatccatagtttattggttggtgctgttgaggagttgtagtgctggtgaaataaaattttccaggatgcagtggtcatcgcaatttggcccaattcaaaggttcaaggtaagctcctgtattgttttttttttggagcttttaattttttttcaagttgcaggtcatgtagggagtcctttttagaatggcttcctccctccattttagagctctgaaccaaagtgatgtcatttattttattttatttatttattttttaagatggagtctcactctgtcacctaggctggagtgcagtggtgcagtctcggctcactgcaacctatgtctcccgggtccaagcgattctcctgcctcagcctcctantagctgggattacaggtgcacaccac

SEQ ID NO: 1120 - DNA, 489 bp, Homo sapiens
cttggtggtgaaggttctggagaagtcagaccagaccaacatcctgagtgccctacttgttttgctccaagacagcctgctagcaacagccagttctcccaaattctcagagcttgttatgaagtgtctctggagaatggttcgactgttgcctgataccatcaatagcattaacctagacagaattcttctggatatccacattttcatgaaggtcttccccaaagagaaactgaagcaatgcaaaagtgaatttcccataaggaccctaaagaccctgctacacaccttatgcaaattaaaagggcccaagatcctggaccacctaacgatgatcgacaacaaaaacgagtctgagctggaggcccatctctgccggatgatgaagcacagtatggaccagactgggagcaagtctgataaggaaacagaaaagggagcatctcgaatagatgaaaaatcatcaaaggccaaagtgaatgatttctt

SEQ ID NO: 1121 - DNA, 527 bp, Homo sapiens
catcaatgtagaactcagccttcttggaaagaaaaaaaagaggctccgggttgacaaatggtggggtaacagaaaggaactggctaccgttcggactatttgtagtcatgtacagaacatgatcaagggtgttacactgggcttccgttacaagatgaggtctgtgtatgctcacttccccatcaacgttgttatccaggagaatgggtctcttgttgaaatccgaaatttcttgggtgaaaaatacatccgcagggttcggatgagaccaggtgttgcttgttcagtatctcaagcccagaaagatgaattaatccttgaaggaaatgacattgagcttgtttcaaattcagcggctttgattcagcaagccacaacagttaaaaacaaggatatcaggaaatttttgggtggtatctatgtctctgaaaaaggaactgttcagcaggctgatgaataagatctaagagttacctggctacagaaagaagatgccagatgacacttaagacctacttgtgatattt

SEQ ID NO: 1122 - DNA, 474 bp, Homo sapiens
aaataaggtgatagtaaattataccttgtagttaatagtaatcaatcaatcaatcactacagtaatcacaaataaggtaaagtctaaattactgccttagcaaacactatgttgtcaggtttttctgctgcaagcccaaggcgggaaacactgcagttattagaagtgagcccaatgatgaatttgcatttgaagctgggagaaagaggaaaaaaagtgtgttctgattatggcatcgagacactgtagcctaaaaaagcaactttattaatgtcctgcagcagcgtacattagtaattataacaatgcattaaaattttcatttcatgtcatagagaatcagttttcttcatgatacattatgttttactgagtgagtttgtccctccagagacctttctgggaacatgccttctccagggactgcttcctaagatgcccaggttgcttaccacaggtcatctttggtcattt

SEQ ID NO: 1123 - DNA, 474 bp, Homo sapiens
tgcaaggcatgggggtgtctgctgcccaggccacttacagtggcctggagagccagtcagtgagtggctgttacggggccggctacagtgggcagaacagcatgggtggctatgactagttttgttaggaacatttgagttacttcaatcattttcacaggcagccaacaagcaattaagagcagttataatagaggaagctgggggacccattttgcaccatgagtttgtgaaaaatctggattaaaaaattacctcttcagtgttttctcatgcaaaattttcttctagcatgtgataatgagtaaactaaaactattttcagcttttctcaattaacattttggtagtatacttcagagtgatgttatctaagtttaagtagtttaagtatgttaaatgtggatcttttacaccacatcacagtgaacacactggggagacgtgcttttttggaaaactcaaaggtgctag

SEQ ID NO: 1124 - DNA, 173 bp, Homo sapiens
ctgatcgcttctcagcgctgcgactggaactttcccctccattactggaagaaacagtcttagttttcacaggtttttctgcttcttcttcaggtcctccggcggctccagctcgctgcgacttttcaggcttctcgtctcccgccttcccgtccgccattttccactccctg

SEQ ID NO: 1125 - DNA, 325 bp, Homo sapiens
cgaagccaagagaaactgaggaaactttccaaaccagtatatctcagatctcatgatgaagtttcctaatctagaggaaagtttatttctgcaaatgatgagccaactagttattgaatgtaaaccagatggcaaaacacttcttgattaggggcaaaaattcaaatgtcttcttaaaacctccacaattgattctccccctgtgatgtaaacttagatatccctagagtttctcagcatctttcttcctgagtggatggcattatccctagaggtcatggaccttacatcctcactgcagtcacctttggaaacaagaccgagg

SEQ ID NO: 1126 - DNA, 268 bp, Homo sapiens
  misc_feature 266: n = A,T,C or G
cctgagcgaccacctccctgttcaggcccagcctctggagttcattcctatcaatgtcattttgattgtgcagtaagatgaaaatttgtcattacaatagttacagtgacagagaaatgcacactatgtatcaaatagcaaggaaatgaagcaaattataacacagtgtggcaacgcacgagcaagtaaccattagagtagcattactttgtccagtaaatgcttcagttccaccacttgtacacttaccaatgatttacctcggncg

SEQ ID NO: 1127 - DNA, 163 bp, Homo sapiens
aaatttacagttctgctcatgcccaatggccccatgcggataaccagtggtcccttcgagcctgacctctacaagtctgagatggaggtccaggatgcagagctaaaggccctcctccagagttctgcaagtcgaaaaacccagaaaaagaaaaaaaagaagg

SEQ ID NO: 1128 - DNA, 482 bp, Homo sapiens
  misc_feature 361, 437, 479: n = A,T,C or G
ccaaagacaatgttcctttccatagcttagtctttccttgctcagccctaggagctgaggataactataccttggtcagccacctcattgctacagagtacctgaactatgaggatgggaaattctctaagagccgcggtgtgggagtgtttggggacatggcctaggacacggggatccctgctgacatctggcgcttctatctgctgtacattcggcctgagggccaggacagtgctttctcctggacggacctgctgctgaagaataattctgagctgcttaacaacctgggcaacttcatcaacagagctgggatgtttgtgtctaagttctttgggggctatgtgcctgagatggngctcacccctgatgatcagcgcctgctggcccatgtcaccctggagctccagcactatcaccagctacttgagaangggtcggatccgggatgccttgcgcagtatcctcaccatatntcg

SEQ ID NO: 1129 - DNA, 313 bp, Homo sapiens
agcgatttgctggtgtagacatccgtgtccgtgtaaagggtggtggtcacgtggcccagatttatgctatccgtcagtccatctccaaagccctggtggcctattaccagaaatatgtggatgaggcttccaagaaggagatcaaagacatcctcatccagtatgaccggaccctgctggtagctgaccctcgtcgctgcgagtccaaaaagtttggaggccctggtgcccgcgctcgctaccagaaatcctaccgataagcccatcgtgactcaaaactcacttgtataataaacagtttttgagggatttt

SEQ ID NO: 1130 - DNA, 553 bp, Homo sapiens
  misc_feature 516: n = A,T,C or G
ccaaaagaaattagcaatgggaaatggttgctttatttggtgaaagtagaatccaaaggattggaaaaggtaacttgtgagccacaaaaggagataaactccctgaacctaacggagtctcacaactcaagaaagaaacgggaaattactgaaaaacagatagatgataacagaaaattttctttatttgctgaaagaaaataccagactcttaactgtagcgtgaacgtgaactgtgtgaacatcagatgcccgctgcgggggctggacagcaaggcgtctcttattttgcgctcgaggttatggaacagcacatttctagaggaatattccaaactgaactacttggacattctcatgcgagccttcattgatgtgactgctgctgccgaaaatatcaggctgccaaatgcaggcactcaggttcgagtgactgtgtttccctcaaagactgtagctcagtattcgggagtaccttggtggatcatcctagtggctattctcgctgggatcttnatgcttgctttattagtgtttatactatggaagtgtg

SEQ ID NO: 1131 - DNA, 158 bp, Homo sapiens
ccgccgcttgtgctgcagccatgtctctagtgatccctgaaaagttccagcatattttgcgagtactcaacaccaacatcgatgggcggcggaaaatagcctttgccatcactgccattaagggtgtgggccgaagatatgctcatgtggtgttgagg

SEQ ID NO: 1132 - DNA, 379 bp, Homo sapiens
ccagaatggtctggatctcctgacctcgtgatctgcccgcctcggcctcccaaagtgctgggattaccggtgtgagccaccgcacccagcctaaagttggtttcttgaagcagttgatgagattgggatcctggttttcagaaatgattggagtgatttatgtaagttgggaggggttttttgatggggttggtaaggtcttacgttaaaggaaaggtatacagagataaatattggtacttgagtcattagctttcaaagaagcctggggtaatggaggaaaggtaagaattgattctgacagaatcttgagatgggcagaattaacatctggaagaggtcacagtgtcctgatttaccttacctgtgtccaggatgg

SEQ ID NO: 1133 - DNA, 252 bp, Homo sapiens
  misc_feature 205, 248: n = A,T,C or G
ctgaccaggcttggagaatgagaaagggttcccaaggacaggatgccagcgggattctttgttgcaaactgcacacagtgcaatttttgggaagcagggatggggagtgggcatgagaccgggttgttgggaccactctggggtcaggccctgggtgaggcacaggaggctgcacacaggcacttggtgggttctgccgggtcanggtgggaaggcaggagtagtgtctgtggcaggacgggaagaancttc

SEQ ID NO: 1134 - DNA, 533 bp, Homo sapiens
  misc_feature 401: n = A,T,C or G
ccagcccaaacagtgtattaatcattagcaaatggaactttaaggagtccttatcattaaggtagtacaagtatttatattgtaaaactgatgtgtagcttgatctttaggggacaggaccaccaaccaatacatgcagattttgtgtgtgtggacagaaggtacttttgacattcagttttgctatatagaaacagaatgaataaatgaacttttttcttttttcttttttttgcaagaggtaagtaaaagattcaatttgattcttctagaggggggaaaaaggagttgaaagtaggtcttcattttgcagtcatcatctgtacgaattcttcatagttgacttgtccgtctccatcaatatctgcttctctgatcatttcatctacttcttcatctgntagtttttctcctaagtttgtcatgacgtgacgtagttctgctgcactgatataaccattgccatccttgtcaaagactcggaatgcctcacggatttcttcttcactatctggatctttcatttttctagc

SEQ ID NO: 1135 - DNA, 101 bp, Homo sapiens
ctggctaattcagtcatgcaaactctgctctcacagttaaaacagttctatgagccaaaacctgatctgctgcctcctctgaaattagaagcttgtattct

SEQ ID NO: 1136 - DNA, 369 bp, Homo sapiens
gtgaggtcccagcttgaagagaaagaaaacaagaagttccctgtgtttaaggccgtgtcattcaagagccaggtggtcgcggggacaaactacttcatcaaggtgcacgtcggcgacgaggacttcgtacacctgcgagtgttccaatctctccctcatgaaaacaagcccttgaccttatctaactaccagaccaacaaagccaagcatgatgagctgacctatttctgatcctgactttggacaaggcccttcagccagaagactgacaaagtcatcctccgtctaccagagcgtgcacttgtgatcctaaaataagcttcatctccgggctgtgccccttggggtggaaggggcaggattctgcag

SEQ ID NO: 1137 - DNA, 519 bp, Homo sapiens
ccttctcctgtgcctgggtgaaggtacagacctcgctgtgtctccgatgaggtcagaagtgtctctatttcataccacaaaggaacccaagtgggagtagggaacagatggatggcgcgaagacctctgtgtctccccagagaaaggaagaaacttaagaaccatcatagcctggtcctccaacatcttacagatcatgttttccaagagaaaagcctgtgttttcagaaactctgaattcagaaaaagaaacggaatgtgcgtaagaatcaggccactgcctggaaagactttctctcaattcgtagcctgaggctcagtgaaggaaacatgcagaaagaatgcctgagacgcccccagggaataagggaactctttataacctccagtgctgtcatctgggatttttctctgaagtacaagaatttcaggtgatttaagctgcttgatcacacttatttgtgcaaaattgattttcatttaatgttaatgttttcctgcttaattttatataacttc

SEQ ID NO: 1138 - DNA, 511 bp, Homo sapiens
aaaagcagtcaagctgtctggactgcaccctctcaactgaagttgagccaaattcccttctctcaaaccctaacgccgccatcactaagagaatgggcatctcggcttggtcagagcattactaacaagctaatgtgggattctctttggttatgaatttttatttttatttaagcatacaaaaaatacagctagaagtaggctcctgcattctaaaagcatttttaatcaacttaaactatgttcttggaaaattcaccacctggactggttcagtctgcccatttccctgtggaatctagtatcagtgttgtatttagcaaattcatttgagtgacgaacagtgactgatattcaggagccccgaggggtgggggcggccggcctgggcagacttagatgctgtccatagctttgaactcgctgagggcctgcaccgggttcacgtgcttcttctgagatgcccgtttaatcttggtctgtgtctcatcctgtttctctctcttcacca

SEQ ID NO: 1139 - DNA, 533 bp, Homo sapiens
  misc_feature 422, 518: n = A,T,C or G
ttttttttaaatatttattccagttattctaattcagaagcattcttttcaagtaacagcagcacttgtgaaaggaaaaaaaatgcacatgtttcttagtaggttactaaatttgtacaattaattaagattttagccatcagtgagtttgaaaagggaaatgtatttattttcagcattaaaatgcttccaaaagatcaagttgcttttgtttgtttgtttttttaaccgtaatgtagatggagaaattggaggcaacctcagtataggaactgccactttgaacagtttaggtcttaaagagaaagtcaatctaatgccaaggggagaacaatgagctgaaattgtaccaactcctctggccctccttccctcaattaaaaaaacacacttaccagttttgcttattttacagatatctngtggttctatagtttaaagcagcttgtgaaattaaaaaagtggactcaattttgtttacctttctgtaagtttttcatttttgctgtatagcattngcaaaaatatgtaca

SEQ ID NO: 1140 - DNA, 338 bp, Homo sapiens
  misc_feature 79, 80: n = A,T,C or G
cctttctactcaggctaatgacaaacacaataaaggcagatatgctagtttaacataattggctgattttatacagcannttatatcttttagtccacaagtatattattaaatgatagagaacatctaatacaaccatttctacagaactaggaaataaatttctaagaaagaaagattttacagaccccatcttttatacccaccccaacagtctaactctaaagaggataaagccaatgactttcctcacaagagctcacgactaacgtcgctttgctatcaaaatctgtatttctgatccgttatgagcattgagacaagattcaaatattccc

SEQ ID NO: 1141 - DNA, 88 bp, Homo sapiens
ctcagcctggtgaaccacacaggccagcgctctgacatgcagaaggtgaccctgggcctgcttgtgttcctggcaggctttcctgtcc

SEQ ID NO: 1142 - DNA, 196 bp, Homo sapiens
  misc_feature 80, 165: n = A,T,C or G
tttttttttttttttaggatcttaaaaaaccatttaataaaaaaaatctttgaagggacaaatgggaagttttcacttanagtttgatttacaagacaataggaggaatcagatttgggaacacaacaggcttgaacactttctggagactgagagacagttcanagtcagccctcaccgttaaccagacccctgg

SEQ ID NO: 1143 - DNA, 482 bp, Homo sapiens
  misc_feature 420, 439, 465: n = A,T,C or G
aaaaaatgggatcaaaggaagaggaaaatgggcaaggtcatctcaaaaggaaacgacctgtcaaagacaggctagggaacagaccagaaatgaactataaaggtcgatacgagatcacagcggaagattctcaagagaaagtggctgatgaaatttcattcaggttacaggaaccaaagaaagacctgatagcccgagtagtgaggattattggtaacaaaaaggcaattgaacttctgatggaaaccgctgaagttgaacaaaatggtggtctctttataatgaatggtagtcgaagaagaacaccaggtggagtttttctgaatctcttgaaaaacactcctagtatcagcgaggaacaaattaaggacattttctacattgaaaaccaaaaggaatatgaaaataaaaaagctgctnggaagaggagaacacaagngttggggaaaaagatgaaacaagctnttaaaagtctaaatttt

SEQ ID NO: 1144 - DNA, 249 bp, Homo sapiens
ctgctgcagagcagccagcagggagtccctgcctcactcggaggtccctgagcccaatcccacaccctgcagagttctcccctctctctgatccaggccgggcctgtacagaggtgctggctgcttgtttacattctcctctggggctctacctctccacacttccccagaagggaaaagggcaccctggattactctttggaaatcactccttggtgggcagcatcctgaggcttccccagaaccagg

SEQ ID NO: 1145 - DNA, 344 bp, Homo sapiens
cctggaaaacattctccaaaaagaagctgcaacatgtgtggacaatgggcttttcatgcctctcttactgtctcttactgtctattgatctggtgcaagaaacatgctctggtgatggctgtgagggaggaatgaggatagacatagacactcctgtgtctcaaacatgcttctttattactctgttatgactctgtcttccctggggcaggaccccagcctgcctacatttgcagacagacacagtggcatgtggagacaacagtgtgtcccaaagacttttctttaccccctagctgtcggcagtactcagtggaagggtgatattatgacactgacactgc

SEQ ID NO: 1146 - DNA, 373 bp, Homo sapiens
cctgtggattggcatccaaatacagagtcttacgcagcggggacgtgggtgcgcgccccgcatgccacggaaagcttacataagtttaacttgaacagagcttgggaaatggggctgcaaaggagggcagttcccacgccaggaaccaacgtgaaagcattggaatcagcacaacagccatggaatcaggcaggcaggggaggacgggctgtgtccttctgagctctatagtacagcaagatttcaagcagtttccagaaaaacaacaacaacgacattttctttccttatcgacgggatattttatggttctggaagcttcgtgttgcacataggaaaaaaaatttctctgaaacgtacaattcatagggac

SEQ ID NO: 1147 - DNA, 432 bp, Homo sapiens
ctgcaggagcaggatcagaagcaagcctatgaaaaacaacagaagcatgcagcgactttcttttatagcaccgcagcatcccaggaagcccagaatcatgatgatggcacctacagcaatcaatatgtccacagcaacgtaggagctagagcctacatcttcagaaccaaaaattgcttgagagtcattgcttactcgtacccatattgctaatgctaggatcaagataccacatagccagaacaagaagttgaaggtaaacatagaatattttatacaggcactcacacctgccatttcggaaaaggattaggaatccagatgccgtgaatttaactattcgttacaggcttgtcctgcaatatgctctggagcaacttgcctgcagagatttctgtatccacggcttcagagcagaaagagaaagcaaag

SEQ ID NO: 1148 - DNA, 299 bp, Homo sapiens
ccacactcatccatcaggtgctggaggcccctggtgtctacgtgtttggagaactgctggacatgcccaatgttagagagctggctgagagtgactttgcctctaccttccggctgctcacagtgtttgcttatgggacatacgctgactacttagctgaagcccggaatcttcctccactaacagaggctcagaagaataagcttcgacacctctcagttgtcaccctggctgctaaagtaaagtgtatcccatatgcagtgttgctggaggctcttgccctgcgtaatgtgcggcag

SEQ ID NO: 1149 - DNA, 543 bp, Homo sapiens
ccaactatgcctctcagaacatcacctaccactgcaagaacagcattgcatacatggatgaggagactggcaacctgaaaaaggctgtcattctacagggctctaatgatgttgaacttgttgctgagggcaacagcaggttcacttacactgttcttgtagatggctgctctaaaaagacaaatgaatggggaaagacaatcattgaatacaaaacaaataagccatcacgcctgcccttccttgatattgcacctttggacatcggtggtgctgaccaggaattctttgtggacattggcccagtctgtttcaaataaatgaactcaatctaaattaaaaaagaaagaaatttgaaaaaactttctctttgccatttcttcttcttcttttttaactgaaagctgaatccttccatttcttctgcacatctacttgcttaaattgtgggcaaaagagaaaaagaaggattgatcagagcattgtgcaatacagtttcattaactccttcccccgctcccccaaaaatttgaattttttttt

SEQ ID NO: 1150 - DNA, 311 bp, Homo sapiens
ctgaagatgatgaggatgacgatgtcgataccaagaagcagaagaccgacgaggatgactagacagcaaaaaaggaaaagttaaactaaaaaaaaaaaaggccgccgtgacctattcaccctccacttcccgtctcagaatctaaacgtggtcaccttcgagtagagaggcccgcccgcccaccgtgggcagtgccacccgcagatgacacgcgctctccaccacccaacccaaaccatgagaatttgcaacaggggaggaaaaaagaaccaaaacttccaaggccctgctttttttcttaaaagtacttt

SEQ ID NO: 1151 - DNA, 55 bp, Homo sapiens
ttttttttttttttttttttttttttttttttttttccaagaattgggaaggttt

SEQ ID NO: 1152 - DNA, 358 bp, Homo sapiens
ccagtacaacacctatcccatcaagctcttctatacgtccaacatccccatcatcctgcagtctgccctggtgtccaacctttatgtcatctcccaaatgctctcagctcgcttcagtggcaacttgctggtcagcctgctgggcacctggtcggacacgtcttctgggggcccagcacgtgcttatccagttggtggcctttgctattacctgtcccctccagaatcttttggctccgtgttagaagacccggtccatgcagttgtatacatagtgttcatgctgggctcctgtgcattcttctccaaaacgtggattgaggtctcaggttcctctgccaaagatgttgcaaagcag

SEQ ID NO: 1153 - DNA, 309 bp, Homo sapiens
aaacttgatccaacctctttgcatcttacaaagttaaacagctaaaagaagtaaaataagaaggcaatgcttgtggaatgtacagtgcatattggcggcgcacgcctcattacgattcgcctgcttgcttctcctgttcaatcgtttctttggaaggcagtggatttttctcttgcgtctctgtcttcttcagtttcgacttatcgaatttctcgatctcagccatatcgggtttgtcagacatggttgcggaggaaaagcgaagcgaggcgcacgagtacgagcgaagtctggtctgcgcagtggcca

SEQ ID NO: 1154 - DNA, 332 bp, Homo sapiens
aaagaatcagcaaaatttcaaataaaaaattatgaaaatattatcctcattagttcatttagtcccatgaaattaattattttctctgcttgatcttggtggacagtttcatgaagctgtcagttagttcattaaagttttggaaattctcagacagtgcagtggtatcagaaacttgtattcaagagtacaggtcagagtcttcttttcttttctttttgagatggagtcttgctctgttgccagactggagtgcagtggtgcgatctgggctcactgcaatctccacctcccgggttcaagcgattctcctgcctcagcctcctgagcag

SEQ ID NO: 1155 - DNA, 535 bp, Homo sapiens
aaaaaaaaatcgccaaaaaactggacttagtttcatctattgtaacatttacctgagatgatcatttctttagtctagaatttgccccaaatcagaagtatacctctgaattatctgtatgtgtcctggattccttggggtcagatttttcctctggtttccaaggcatttttttttctttaatgcagtaaaaccattcctttaaaacccaaaatctctcatggaacccctacgtatcaaatatataaagcaggagctgcccttgttcagggataatatgtggggcttatggctctaagaaacacagtttgacattcactgctctccttacttcagttacctcatggtatagataaatgggctgggcccagagaggggccatgacctgtcctgggacacgcagccactgaagcctttagtccagtgctccttccacagcaccacactggattctggagtctttccagccagggcagaggaagctgcaacagtgccacgataagagtttctgggtcttctggtacctaccctctca

SEQ ID NO: 1156 - DNA, 518 bp, Homo sapiens
  misc_feature 45, 346: n = A,T,C or G
tttttttttttttttttttacaaagtaaactatgatttttattgngaaattttcatagatggaaaattgaatattctgtccatttcattttacaattatcttaccacttatttttgtaccatgtatttcaattgcctgtttagtgaaaaataaaaattaaaaaaacctattcatttttggcttgtgtttagcttaaattttatcattaaattaaggagcccacaacaaaatgtgttgccagcagccatatcccaagcccctgcgtgaagaatgttttggctgctatttcaacctaaggaaacaacgtttgacctcagtcaccttaaaatgccagtgtgggcagaanattttttattcctcacaattaaaaaccaaacaaaaacccctaggatcttgaaggtcctatttcagaaaatcttcatatatgcaaaatgtcaccaaaataaatacatttgcctcaattatcattaccacccagtattcatgttttaatttttagggatataatttctaaattt

SEQ ID NO: 1157 - DNA, 498 bp, Homo sapiens
ccagagttgactctaggtagtgatgtgattttcttgggatgtttttctaaatattcttttatgctaaagcacatggcttgatacttctgttgattaagctcgtgtctacttacagtcatctagtgagaacctgtggtgtggtgagatgataacttggtctttggtcttcatcatttgaactagttttggttttgtcttgtcccttccttgagcattttgtgtgtgtttaatcctatttggtaaacgaaccactgtgaaagaccaagttggagaaaacagaacacccccaaaacatttattttttttttagaaaatcatggctcactatggtagtatacaatattgttttcacacatgtacacttgaaaccaaatttctaaaacttgtttttcttaaaaaatagttgttgtaacattaaaccataacctaatcagtgtgttcactatgcttccacactagccagtcttctcacacttcttctggtttcaagtctcaagg

SEQ ID NO: 1158 - DNA, 451 bp, Homo sapiens
gatgaatgcggctgttaagacctgcaataatccagaatggctactctgatctatgttgataaggaaaatggagaaccaggcacccgtgtggttgctaaggatgggctgaagctggggtctggaccttcaatcaaagccttagatgggagatctcaagtttcaacaccacgttttggcaaaacgttcgatgccccaccagccttacctaaagctactagaaaggctttgggaactgtcaacagagctacagaaaagtctgtaaagaccaagggacccctcaaacaaaaacagccaagcttttctgccaaaaagatgactgagaagactgttaaagcaaaaagctctgttcctgcctcagatgatgcctatccagaaatagaaaaattctttcccttcaatcctctagactttgagagttttgacctgcctgaagagcaccagattgcgcacc

SEQ ID NO: 1159 - DNA, 375 bp, Homo sapiens
cctcttgggtgcattgggatccttgaacttcttttttgtctcccctttgggagggatataggttttcatttctctttcataacgggccttgtccgcttttgccatatcttcaaattttcctttctctttagcagacatggtcttccacctctctgagcacttcttagaaaactctgagaagttgactgaagcatctgggtgcttcttcttatgctcctcccgacaagtttgcacaaaaaatgcatatgatgacattttgcctctcggcttcttaggatctcctttgcccatgtttagttatttttcctcagcgaggcacagagtcgcccagtgcccgtccggctctcacttgccccggcgctgtctctatggagc

SEQ ID NO: 1160 - DNA, 354 bp, Homo sapiens
ctgagcctgcactcataaatatgatactgtcctgcttctcccttgctaatataggcaataaagagctttctgaaggggaagaaatattattattaaactgatttaatgaattactataattgcagtttcaataattagttttgtaaaatgcaactggtatagcagtttttgaagttttctaattttttccttctgttcactttggttctgttaggtttgccttttcaccattgtctgaggaagaggaggaggatgaacaaaaggagcctatgctgaaagaaagctttgaaggaatgaaaatgagaagtaccaaacaagaacccaatggaaatagtaaagttaacaaagcacagg

SEQ ID NO: 1161 - DNA, 88 bp, Homo sapiens
aaacagttggaacaccggtggcactgttaactgctttctgggcagcctctttagcttggtgggcttgtagtacagctacagcttcatc

SEQ ID NO: 1162 - DNA, 74 bp, Homo sapiens
cctcagccatgaagggtccaacagttctcttcagtgggctgggtcaaaattacaaggggaattggatgcattgg

SEQ ID NO: 1163 - DNA, 86 bp, Homo sapiens
aaatacatcgtgacctgtgtaattatgcagaagaatggagctggattacacacagcaagttcctgcttctgggacagctctactga

SEQ ID NO: 1164 - DNA, 132 bp, Homo sapiens
aaagaggattctcataaggaaagcaatgactgttcttgcgggggataaaaaagggcttgggagattcatgcgatgtgtccaatcggagacaaaagcagtttctctccaactccctctgggaaggtgacctgg

SEQ ID NO: 1165 - DNA, 434 bp, Homo sapiens
ccgggcaggtctgtatcaccacagttaatagatgtctgatgtgtcccagtcacagagataatacaaatgtgaggaaataatgctggtgcctgaaagcattggagaccatttgtaagaatgccatttggtagttaaagtgaacatgaaaattgtttagtttttcttggtttcataaacattttttcttcctgtagaactgataaatttcaaacggaagagagtggcagcatttagaaagaatctaattgaaatgtctgaactggaaataaaacatgccaggaacaatgtctcccttttgcagagctgtattgacttgttcaagaataactgatatgccttcactcagaagaaaagaaatgaatgtgaaagaaagccaagcatcacttgcacttaaatcattaccacggaagatatattagcttcaactttagttt

SEQ ID NO: 1166 - DNA, 398 bp, Homo sapiens
cctacagacttatttcttcttggacacacccacggtgcggccacggcggccagtggtcttggtgtgctggcctcggacacgaaggccccagaagtgacgcagccctctatgggcccgaatcttcttcagtcgctccaggtcttcacggagcttgttgtccagaccattggctaggacctggctgtattttccatcctttacatccttctgtctgttcaagaaccagtctgggatcttgtactggcgtggattctgcataatggtgatcacacgttccacctcatcctcagtgagttctcccgccctcttggtgaggtcaatgtctgctttcctcaacaccacatgagcatatcttcggcccacacccttaatggcagtgatggcaaaggctattttcc

SEQ ID NO: 1167 - DNA, 534 bp, Homo sapiens
  misc_feature 508: n = A,T,C or G
aaacactgctggtgctttatgaaaggatttctgtttacctgttgcacacgtaacatgttcttacgaagttttctcgctgtgtagaaaatgcttaaaatgtctacatcattttcattacacccccttaagcatgtttttccttcacaaggtgcagtccattgacagtgttccgtattgcacgtgcaatttaactttattagcactatttgtagcaaacacgagcctagtgaattacagatctgtgtgggccagagggattttgccacgtaataatgaagcttgacagggtcattctcataaactgtctggctacatatatatttttgcatttaatgcctattcaatatattctgaaggtgctactcttggtgttatcaagagttcataggggttagggggaagtaagagcttgttaatgtatttgggaagcacacctatgttcacagacacaaaatggaattgcatggtcacccccttagtcttggtttgttggctttttgtattgaanaaagggttaaataaaaacaaaaataa

SEQ ID NO: 1168 - DNA, 495 bp, Homo sapiens
ctgcaataatccagaatggctactctgatctatgttgataaggaaaatggagaaccaggcacccgtgtggttgctaaggatgggctgaagctggggtctggaccttcaatcaaagccttagatgggagatctcaagtttcaacaccacgttttggcaaaacgttcgatgccccaccagccttacctaaagctactagaaaggctttgggaactgtcaacagagctacagaaaagtctgtaaagaccaagggacccctcaaacaaaaacagccaagcttttctgccaaaaagatgactgagaagactgttaaagcaaaaagctctgttcctgcctcagatgatgcctatccagaaatagaaaaattctttcccttcaatcctctagactttgagagttttgacctgcctgaagagcaccagattgcgcacctccccttgagtggagtgcctctcatgatccttgacgaggagagagagcttgaaaagctgtttcag

SEQ ID NO: 1169 - DNA, 475 bp, Homo sapiens
ccagaactcctcactgggcattatttggtgccagtgaaagaggctttgatcccaaggacacaagacatcagagaaagaacaaatcaaaggctatttctggatgttgagattatctgatttcaaggtactgaaggacaaaaacttggatggcctcaaaaggttcttgaacaccactgtgattctccaaggacgaattacgtaaattatactttcatacaaaggagacgataaggcagtaaacatggagacacgggggacagcgtccacactcagagggcctgggccacagccccgatgtttcttttcagaactcagcccctttcctgattttacttctaagaggaaaattattttggggaggaactacacagtcgtgattagaatttatctgatggttttgtattataacttgtaagacctgccagaatgctagtcccgagagtgtcagacaaggaagaagtccctgggcctcttc

SEQ ID NO: 1170 - DNA, 240 bp, Homo sapiens
ccaggtttctgcccacattggacccacatgaggacatgatggagcgcacctgccccctggtggacagtcctgggagaacctcaggcttccttggcatcacagggcagagccgggaagcgatgaatttggagactctgtggggccttggttcccttgtgtgtgtgtgttgatcccaagacaatgaaagtttgcactgtatgctggacggcattcctgcttatcaataaacctgtttgtttt

SEQ ID NO: 1171 - DNA, 59 bp, Homo sapiens
ccaacatggtgaaaccccgtctctactaagaatacaaaaaattagctgggtgtggtggt

SEQ ID NO: 1172 - DNA, 304 bp, Homo sapiens
ccaagtaagctgtgggcaggcaagcccttcggtcacctgttggctacacagacccctcccctcgtgtcagctcaggcagctcgaggcccccgaccaacacttgcaggggtccctgctagttagcgccccaccgccgtggagttcgtaccgcttccttagaacttctacagaagccaagctccctggagccctgttggcagctctagctttgcagtcgtgtaattggcccaagtcattgtttttctcgcctcactttccaccaagtgtctagagtcatgtgagcctcgtgtcatctccggggtgg

SEQ ID NO: 1173 - DNA, 236 bp, Homo sapiens
ctgtgacggcttggagaaacagtgtaaactggcagtgtaaacaaaagcagggcatgtatgagtagttgagaatggtgaataggagtatgactagacagaagatagtagggatgacaagttatttgggggcacagtctaagtttgtctggtgtctggaatgaggctggggcctaataaaaaggaacgtctatacaggagctcaaatgggctgtaccttgtagcattctgaggacagg

SEQ ID NO: 1174 - DNA, 302 bp, Homo sapiens
caggtccacatatgcccctgtcatctctgctgagaaagcctaccacgaacagcttactgtagcagagatcaccaatgcttgctttgagccagccaaccagatggtgaaatgtgaccctcgccatggtaaatacatggcttgctgcctgttataccgtggtgacgtggttcccaaagatgtcaatgctgccattgccaccatcaaaaccaagcgtaccatccagtttgtggattggtgccccactggcttcaaggttggcatcaactaccagcctcccactgtggtgcctggtggagacctgg

SEQ ID NO: 1175 - DNA, 154 bp, Homo sapiens
cgcaaaactaaccccctaataaaattaattaaccactcattcatcgacctccccaccccatccaacatctccgcatgatgaaacttcggctcactccttggcgcctgcctgatcctccaaatcaccacaggactattcctagccatgcactact

SEQ ID NO: 1176 - DNA, 435 bp, Homo sapiens
aaaagcaacatgtttttataagaaaattgttataaatgaaaaacgtgacttcttgaagacagttttgaatgtctaaaaatgttgttatcactactgagaggaaacttgcctatgaaaaatattataatgagtttgtggaaaaaagttaacaggttaaatattttaagccatttaactatagcataatattagtcatctgagcactttcagtatcactcttattttattaaatttatccaatttattaatagaaactaggccctgattggcagttctgttattactaatggttcaagttttctatttacacagattttaagatttaatttctcgaacaacagtctcttgattaggagtttcgtcttcttcaaaggttgggttgtcaacatgaggaataacatccactgccacagaatttgcttcatggtttaccag

SEQ ID NO: 1177 - DNA, 267 bp, Homo sapiens
ctgaggaagctcttcattggagggttgagctttgaaacaactgatgagagcctgaggagccattttgagcaatggggaacgctcacggactgtgcggtaatgagagatccaaacaccaagcgctccaggggctttgggtttgtcacatatgccactgtggaggaggtggatgcagctatgaatgcaaggccacacaaggtggatggaagagttgtggaaccaaagagagctgtctccagagaagattctcaaagaccaggtgcccac

SEQ ID NO: 1178 - DNA, 236 bp, Homo sapiens
aaaagtagtattaataaaggcttcaaaactccaaagtaattttctggtaagaatttcaagtactatatcagaaagtataaaactgtttcaaacagaaaaaaaaaatccttaagccccccaaaaatggaaactatgaaaatctgtgtccccaaaatatatgcaatagtgcaagactttccctcaaacatggaagacctcattcaaagggggaaaaagggacagattttactcatatt

SEQ ID NO: 1179 - DNA, 316 bp, Homo sapiens
cctttgtccggcaccctgcccacaggctgagctcagccccaggccctttcaggcatctagacactcccatagcctgtcaggctggggcaaggagatcccaggtcacacatactccttggaagagttggacttagggtaagagcggggtgcacggtacccagccttgctctcattcccaggacaggaacaggagagtagtgcacctcccaggatgactagggcagaccctgcccagccaataaagatggcagggccaaactcatacttaatgttggtagggatcaaagggttataaaagtctgtgacaatctgatgg

SEQ ID NO: 1180 - DNA, 391 bp, Homo sapiens
  misc_feature 339: n = A,T,C or G
aaagcggatctttcctctttgggccatgggtggatttcctgctcaagcaaccttcatctcttaagctgtgttgcctggaatctggactttccattcaagctggggcccatcaatcactcggcggctcctctaatgtcttaatcatcctgaaatgcctctgccggccgcattacgtgcctaaatccaaatcatgcctcgactctttccagaaccctctgtcgccatgctagcgtccacagacctgctcccttgaacacctcctctgagattcactgtccacgcactgtgcttttcctggcttggtcggttcctgtgttcacgtacttcctggctttgcancttggcactggagctgagtctgaaccccagccttaccctgaagtagttacgt

SEQ ID NO: 1181 - DNA, 604 bp, Homo sapiens
  misc_feature 550, 563: n = A,T,C or G
ccagcccaaacagtgtattaatcattagcaaatggaactttaaggagtccttatcattaaggtagtacaagtatttatattgtaaaactgatgtgtagcttgatctttaggggacaggaccaccaaccaatacatgcagattttgtgtgtggacagaaggtacttttgacattcagttttgctatatagaaacagaatgaataaatgaacttttttcttttttcttttttttgcaagaggtaagtaaaagattcaatttgattcttctagaggggggaaaaaggagttgaaagtaggtcttcattttgcagtcatcatctgtacgaattcttcatagttgacttgtccgtctccatcaatatctgcttctctgatcatttcatctacttcttcatctgttagtttttctcctaagtttgtcatgacgtgacgtagttctgctgcactgatataaccattgccatccttgtcaaagactcggaatgcctcacggatttcttcttcactatctgtatctttcatttttctagccatcatagtcaaaaattcnggggaagtcaatngtgccattaccatcagcatccacttcattgatcatatcctg

SEQ ID NO: 1182 - DNA, 601 bp, Homo sapiens
cctgctgggcttggcaacgagggactcggcctcggaggcgacccagaccacacagacactgggtcaaggagtaagcagaggataaacaactggaaggagagcaagcacaaagtcatcatggcttcagcgtctgctcgtggaaaccaagataaagatgcccattttccaccaccaagcaagcagagcctgttgttttgtccaaaatcaaaactgcacatccacagaacagagatctcaaagattatgcgagaatgtcaggaagaaagtttctggaagagagctctgcctttttctcttgtaagcatgcttgtcacccagggactagtctaccaaggttatttggcagctaattctagatttggatcattgcccaaagttgcacttgctggtctcttgggatttggccttggaaaggtatcatacataggagtatgccagagtaaattccatttttttgaagatcagctccgtggggctggttttggtccacagcataacaggcactgcctccttacctgtgaggaatgcaaaataaagcatggattaagtgagaagggagactctcagccttcagcttcctaaattctgtgtctgtgacttt

SEQ ID NO: 1183 - DNA, 446 bp, Homo sapiens
  misc_feature 328, 385: n = A,T,C or G
ccagatttctggcacttgtagcaagctcctgtgggaggaggttctggaggaacgcctggctgctgcggttcaggtgtttggaagttcttgtttgctggagatgtggctggggtttgtctcacagtggaggcaaggaattgcaactttttttttttattattgtacaccttgaaggcgaggttaattaaatcctgttgtggagtttgagggccggaatttaatttttggagttttatttaatatcgggagcagattgggtaataaaatgtatattgagaataagacggccttttgaccttttagggtctagggctgtaaagtgtctcanggttgctgccgaacgagccatgaactgggctgggtttttatatttgatgaaaaagancctaaacgcttctgatttgggataaagaaaaaggagcattaaccttgactatgtctttagc

SEQ ID NO: 1184 - DNA, 423 bp, Homo sapiens
  misc_feature 384: n = A,T,C or G
aaaaatcaggcaagttgtctgtaacatttttcaataatctgggaagcactgcaatccagtgtacgatgtgctgattagtgttgtctttgttggcactgacccaccaagggaatgacatgtacgatgaagaaaaagtgaaatacactgtgttcaaagtattgaagaactcctcgcttgctgagtttgttcagagcctctctcagaccatgggatttccacaagatcaaattcgattgtggcccatgcaagcaaggagtaatggaacaaaacgaccagcaatgttagataatgaagccgacggcaataaaacaatgattgagctcagtgataatgaaaacccttggacaatattcctggaaacagttgatcccgagctggctgctngtggagcgaccttaccccagtttgataaagatcatgatg

SEQ ID NO: 1185 - DNA, 389 bp, Homo sapiens
  misc_feature 209, 216, 228, 242, 260, 287, 305, 353, 355, 382: n = A,T,C or G
aaactccaaatgctgcagatgaaagtaaatacaacaaatgcaagtaaatacaacaaaataacaataaaatcacttgtgtgctgacttgctggattctggttaagcacagatgggatgttcctgatattcactaagaagagtctaactaatggctactgtgtgtgtgtcagtagcccagggttttttttttttttttttttttaaggganaacctancattttatttanatcttcattaaacngttggaattgagaaccanacatacgtaataaacctccaaaaatanatcctgaaaggcactttntgcttagggcaagcagtcatggaataagcatgtaaacaagctggcttntntgtaccacaccagccaagtcagctttntccatgg

SEQ ID NO: 1186 - DNA, 309 bp, Homo sapiens
ccaccatctcgcgctccttgcgttcggggaagccgtagtctggcgggaaggttggctgtttttacatctaaagcaatagactagaactgaattatcttctacatagtaaaatcacaattgtggaattacaggaattctggtgatattaaggtgaaataacaaaacacaaaaggccctattttaacagttgatgtgacagtaagttttaatagaacctgtaacttcattttggaaatgcttctccaccaaataagggctttttcccctatttaaggagccagatggattgaaagatgtggaaataggcag

SEQ ID NO: 1187 - DNA, 277 bp, Homo sapiens
atcacatctccccaaaatcatctaagagacatatttacacaagttctgaccatgctaaaaaattcatgaatgtgatggtgtataaagcatttggtacatgatgatacttgctttccagaagctggcatttgcatattataaaacgttaagaagaaggctgacctcggaatgtaacagacaatagttttatgtttcttctcaatatacagtgacctggaaggactccctgttgttaaaacctgcttccccactgctcagcctgccatcagccatccag

SEQ ID NO: 1188 - DNA, 67 bp, Homo sapiens
caggctgccagccccccagtccagccctctcccttccactggtgccttgcttagagccagaagggat

SEQ ID NO: 1189 - DNA, 423 bp, Homo sapiens; identical to SEQ ID NO: 879

SEQ ID NO: 1190 - DNA, 279 bp, Homo sapiens
  misc_feature 1, 35, 126, 186, 229, 269: n = A,T,C or G
nccagctcgatgaaactccgtctctactaaaaatntaaaaattagcagagcacagtggcacctgcctgtaatcccagctactcaggagggtgaagcatgagaactgcttgaacctgggaggcggangttgcagtgagccgagattgtgccactgccctccagcttggacaatagagcaagatttcntctcaaaaaaaaagagaaaaagaaaaccattattttgcaatanccaatgttataatctacacaggcacagactatcaatgctnaaaatcattt

SEQ ID NO: 1191 - DNA, 580 bp, Homo sapiens
  misc_feature 561, 571: n = A,T,C or G
cctacttctgcttcctcaggacaacttccccacctctgtcctgggaccacctgcccgcctgggcctgcagtgactaaggacgctgctcccactccaggggccagtgacagagagcagctatacagagggcccaccccgcaggatccttgacaggagctgagacagaacaaactgctgcttgtctccctaccctgggggctgtgatattcttggtaacatctctgagctggtctgtgaggtcacttcctcttttaacactgttgaggagactccaaaccctgtcttttcctcgtcttctcatgtcgattgggcaccagccattctcaggcaccagagcacagccccacacgggtgccccatcagacagggctgcccacagcagcctcctacacctgaactgggtttctctgcacactcacagccgtctcaccagctcaatgagctgctggatgtttttgttttggttcgacaagccgttcctgatgttttcgagtaggcatctcttcaattcaaatatggcttcactgtaggccaagctcactgcggccatgggaggtgctncgtgccacangacctcggc

SEQ ID NO: 1192 - DNA, 269 bp, Homo sapiens
ccacactcttcaagatcctggcgtccttctacatcagcctagtcatcttctaaggcctcatctgcatgtatacactgtggtggatgctacggcgctccctcaagaagtactcgtttgagtcgatccgtgaggagagcagctacagcgacatccccgacgtcaagaacgacttcgccttcatgctgcacctcattgaccaatacgacccgctctactccaagcgcttcgccgtcttcctgtcggaggtgagtgaaaacaagctgcggcag

SEQ ID NO: 1193 - DNA, 396 bp, Homo sapiens
ccttcctcccttccagcactggggctcaacagtggactgagtgtttggtagtgtacatttccaatcttaatagagcaaagccagacttctgctttgatgactgagctacagggacaggagtggtccaaggttctcaaattctgtttttgtttttttccagacttctatactattgtctgccctaggctgtagggaatgctggttagtttgctgaacagacactgtgttcagcagggtttgtggtatctcaaatcccaggtctcagccaaagctttgcagttcaccctgactccagggaacagggcctcctttcgaggtgaggcacttgggttcttgcccttgcttcttcccagtgagaactgtttcctcctacttctacaagcattgcactgccag

SEQ ID NO: 1194 - DNA, 341 bp, Homo sapiens
ccaccaattggatccaggagaaagtgtggctctctcaggaggtggacaaactgagagtgatgttcctggagatgaaaaatgagaaggaaaaactcatgatcaagttccagagccatagaaatatcctagaggagaaccttcggcgctctgacaaggagttagaaaaactagatgacattgttcagcatatttataagaccctgctctctattccagaggtggtgaggggatgcaaagaactacagggattgctggaatttctgagctaagaaactgaaagccagaatctgcttcacctctttttacctgcaatacccccttaccccaataccaagaccaaa

SEQ ID NO: 1195 - DNA, 423 bp, Homo sapiens
ccaccaatggtactgaacctacgagtacaccgactacggcggactaatcttcaactcctacatacttcccccattattcctagaaccaggcgacctgcgactccttgacgttgacaatcgagtagtactcccgattgaagcccccattcgtataataattacatcacaagacgtcttgcactcatgagctgtccccacattaggcttaaaaacagatgcaattcccggacgtctaaaccaaaccactttcaccgctacacgaccgggggtatactacggtcaatgctctgaaatctgtggagcaaaccacagtttcatgcccatcgtcctagaattaattcccctaaaaatctttgaaatagggcccgtatttaccctataacaccccctctaccccctctagagccaaaaaaaaaaaaaaaa

SEQ ID NO: 1196 - DNA, 314 bp, Homo sapiens
catgaatgtcctggcagatgctctcaagagtatcaacaatgccgaaaagagaggcaaacgccaggtgcttattaggccgtgctccaaagtcatcgtccggtttctcactgtgatgatgaagcatggttacattggcgaatttgaaatcattgatgaccacagagctgggaaaattgttgtgaacctcacaggcaggctaaacaagtgtggggtgatcagccccagatttgacgtgcaactcaaagacctggaaaaatggcagaataatctgcttccatcccgccagtttggtttcattgtactgacaacctcag

SEQ ID NO: 1197 - DNA, 71 bp, Homo sapiens
aacgagttcatcctgcagcccatccacaacctgctcatgggtgacaccaaggagcagcgcatcctgaacca

SEQ ID NO: 1198 - DNA, 408 bp, Homo sapiens
cctcactttttggagccaccttagctggtgcctaggcagaggggcagtcagcagtggttatcaggatcctggctctatgggttgccttcctcctggtctgtaaagcccctgcaggcagggacttcttagatagctgcttccttagggcatggcatgtagtgggtggttaatgaatggaagagagggaatgagtgatcaagggagggaggagggagtggagtggagatttctcatcctttcctgttaatttatgacatcctcctgcctatgagtccttgactctggagttttacaaagcagtcacatttcaaataaaagtctgggaaagcaacacatcatcgccaacttttaattttgctaaataaggatattagaaaaagaatagaaaattgcagtcccttactgttt

SEQ ID NO: 1199 - DNA, 514 bp, Homo sapiens
gtagtttcttcatttcaggaagactgacagttgttttgcttcttccttaaagcatttgcaacagctacagtctaaaattgcttctttaccaaggatatttacagaaaagactctgaccagagatcgagaccatcctagccaacatcgtgaaaccccatctctactaaaaatacaaaaatgagctgggcttggtggcgcgcacctgtagtcccagttactcgggaggctgaggcaggagaatcgcttgaacccgggaggtggagattgcagtgagcccagatcgcaccactgcactccagtctggcaacagagcaagactccatctcaaaaagaaaagaaaagaagactctgacctgtactcttgaatacaagtttctgataccactgcactgtctgagaatttccaaaactttaatgaactaactgacagcttcatgaaactgtccaccaagatcaagcagagaaaataattaatttcatgggactaaatgaactaatgaggataatattttca

SEQ ID NO: 1200 - DNA, 245 bp, Homo sapiens
aaatgagattcgttattgttgcttttatgtgaatccttagtacatggcctgctgcaaacacccaggacaccgaggaaatggtcgttgctgtttgattttcctcatccccagtctcaaggggaagccaggccaatgagaagagccacttgccatcaggctgtccctttaggagtcactgaaagggccccagggtgggatggtggggagataagaaccacgagagaagttggcacaaaggagttatg

SEQ ID NO: 1201 - DNA, 190 bp, Homo sapiens
ctgaaaacagtgggaggccagatgctggcgtcttccaggcgggaacgtagccatgatcactctagggccgatgtctcctggggctctccggcaggacaagacaggtgcaccggtactgtgcaatcccagttttacttagagccacctcttgtttgggggggcattagtcctcatttcatgccagattttc

SEQ ID NO: 1202 - DNA, 552 bp, Homo sapiens
ctgtttcaaagttggggtctgttcttgaatcctctattaattactgtgtgtgagccagagggagctgtggtaagggttgggcccccagcctgtagggaactttctggactcccactctttgaatcgatataggcatttggtctcactacttgaccattctcaccctgtgaaacgtcccacactttgaagcaaatacaattcacagcacagtacacacaaaaaccttggcataagacagagaaggttcttcttattttgtgggctggttgctgtagaaacacataacaaagggcagccctccacttctggtataattgtgtagccccttttctttgggcttgacacctgtcttgaataagagtgattagagctgcataatgtccctctcttggctattgaccatgtggttcacgtacaaaactctgtataagttgaaggaaaatgttcatgttcatatgtacttgtttgctatgactacattttgaggttttgtaaaactgttattttttttttttcacaatgtgaaactgaaggtcaataaattattagaga

SEQ ID NO: 1203 - DNA, 373 bp, Homo sapiens
aaaaagtacatctctctccctcctcccccacatgcacaaggctcacatctcattatggtgcggcccatgtacattaaagtgtgatacttggttttgaaaacattcaaacagtctctgtggaaatctgagagaaattggcggagagctgccgtggtgcattcctcctgtagtgcttcaagctaatgcttcatcctctctaataacttttgatagacaggggctagtcgcacagacctctgggaagccctggaaaacgctgatgcttgtttgaagatctcaagcgcagagtctgcaagttcatcccctctttcctgaggtctgttggctggaggctgcagaacattggtgatgacatggaccacgccatttgtgg

SEQ ID NO: 1204 - DNA, 479 bp, Homo sapiens
ctgttgctggaagacatggcggttgtggaaatgacccaagcaaagcggttctgctttctggctggtagttctgagtgtctcgttgctgccaggctgttgagagggttcagcacccagggtcttgtgctgcttattgccaggtgcactcagagagacattctgaagggaaccctgcaagttgcctgttgttgttcttcccaggggaggactgagcatacaaccactgcttcccaagggaggcttttcccacaaagggggcacagcagtctcctgtccattttttactggtggacccaccatggctgttgcctcctcaggtagactgatgcctgataacccattggcactgagtttccccagtgatgctgcctgcagcagtgcatccatcttcttcctagtttcctcttttgtgagagccagctctctcttcaggagctcggcgccatgccaatgctgccattctgtaaagcagtgtcgga

SEQ ID NO: 1205 - DNA, 456 bp, Homo sapiens
ctgtgatgtcttggagaaacagtgtaaaccggcagtgtaaagaagagcagggcatgtatgagtagttgagaacggtgaacgggagtatgactaacagatgaggatgaaatttgggcttcactgaagtaatgggggctgtctgtgaagccttgtggcagtgcagcccaggtaatttgttgagcctaatgggtgtcagggtcagtctaagtgaaggcaaagagaggctgggatgaagggtgcaaagcaatagtaaagaaagcatgtctgagatccagaacagaataatgggtagtagagggaggtattgaggataggagagtatatgggtttggcaccacggggtggataggcaaaacaatttggttgataaggcgcagatcctgaactaacttgtaaggcttgtctcgttttaggacaggaaaaatgggggaattgtaaggagagtttatagggttt

SEQ ID NO: 1206 - DNA, 520 bp, Homo sapiens
aaatacattttcaaaattatctattactaggtccactggtctccacataatgaaactattctggcttcaagtggtactgaccgccgcctgaatgtgtgggatttaagtaaaattggggaagaacaatcagcagaagatgcagaagatgggcctccagaactcctgtttattcatggaggacacactgctaagatttcagattttagctggaaccccaatgagccttgggtcatttgctcagtgtctgaggataacatcatgcagatatggcaaatggctgaaaatatttacaatgatgaagagtcagatgtcacgacatccgaactggagggacaaggatcttaaacccaaagtacgagaaatgtttctgttgaatgtaatgctacatgaatgcttgatttatcaagcgccaaaaaggcattgtatagtaggaaatgtaagtggggtggcttatggcttctttatcctctgattctagcactttcaagtgagctggttgcgtactgtatcatattgtagc

SEQ ID NO: 1207 - DNA, 375 bp, Homo sapiens
aaagaaggtaaaattggaaaaaaaaaaaaaaaagaatttttttttgttttaattaaaacctctccttacaaaataaataattttagcaagtggaatgtcttgaaggttaactgctggtgttctgagaggcacaggtgacagagcgagcaggcatctgccttccacatggggcccaggcaggcaaccgggggcagtgtgctcgggcacttattggctgctgaaacattcccagaacagatttcatctcctttgcttgccttttacctctttcttaagactgcagtgaacaagcaaaggcaggaggaaatgcactaaaagagtgcaaatgtttcccagcagcaccgttttaaggctcaaggtgtttttctcttcttt

SEQ ID NO: 1208 - DNA, 454 bp, Homo sapiens
cctgacattcctgccttcttatattaataagaaaaataaaacaaaatagtgttgaagtgttggggcggcaaaaatttttgggggtggtatggagagagaatgggcgatgtttctcagggctgcttcaagcgggattaggggcggcgtgggaacctagagtgggagagattaagctgaatggaagatcttgtggtaaggggtgatattgtggggttgttagaagaaacatttgtcgtatagaatgattggtgatggcctggatacggttttgtatgaattgaaaaatggaataagagaaggagagaaacaggtataaaaggtctaagaattgggaggacctaggacatctgattagagtgcctaaggagattcggcatagtcctgccagcaaagattatttatttacttcaagagtttagagtggcagtttggggatagcaccaggagatatcag

SEQ ID NO: 1209 - DNA, 324 bp, Homo sapiens
  misc_feature 43, 178, 209, 264, 282, 286: n = A,T,C or G
aagctttttttttttttttttttttttttttttttggataagngctttatttttatattctctatgaaaacatcaataattaagcccctttgttctaagccagaaacactgtaaaactaccattaaacaaggcagtatgccttacaagaaagacataaaatgtccaagggatatttanaacattttagttcttaaagtttcaacatganaaatgttgaccacacactgggaaatcatttcaataaataacaactgacattcatntaaacagttacaaaacanatgngcacatacattcccctgccttcacaatgatctcattgg

SEQ ID NO: 1210 - DNA, 535 bp, Homo sapiens
ggaagaaatcgatgttgtttctgtggaaaagaggcaggctcctggcaaaaggtcagagtctggatcaccttctgctggaggccacagcaaacctcctcacagcccactggtcctcaagaggtgccacgtctccacacatcagcacaactacgcagcgcctccctccactcggaaggactatcctgctgccaagagggtcaagttggacagtgtcagagtcctgagacagatcagcaacaaccgaaaatgcaccagccccaggtcctcggacaccgaggagaatgtcaagaggcgaacacacaacgtcttggagcgccagaggaggaacgagctaaaacggagcttttttgccctgcgtgaccagatcccggagttggaaaacaatgaaaaggcccccaaggtagttatccttaaaaaagccacagcatacatcctgtccgtccaagcagaggagcaaaagctcatttctgaagaggacttgttgcggaaacgacgagaacagttgaaacacaaacttgaacagctacggaactct

SEQ ID NO: 1211 - DNA, 395 bp, Homo sapiens
gcgatccgagccgggacgggctgcaggcgggggtgctgcagaggacacgaggcggcgggctggagacatggaccgcggcgagcaaggtctgctgagaacagacccagtccctgaggaaggagaagatgttgctgccacgatcagtgccacagagaccctctcggaagaggagcaggaagagctaagaagagaacttgcaaaggtagaagaagaaatccagactctgtctcaagtgttagcagcaaaagagaagcatctagcagagatcaagcggaaacttggaatcaattctctacaggaactaaaacagaacattgccaaagggtggcaagacgtgacagcaacatctgcttacaagaagacatctgaaaccttatcccaggctggacagaagg

SEQ ID NO: 1212 - DNA, 463 bp, Homo sapiens
  misc_feature 38, 129, 168, 206, 217, 250, 262, 288, 303, 314, 323, 332,363, 365, 381, 425, 443: n = A,T,C or G
tttttttttttttttttttttttttttttttaaggggngcacttttattcaactggtctcaagtcagtgtacaggtaagccctggctgcctccacccactcccagggagaccaaaagccttcatacatntcaagttgggggacaaaaaagggggaagggggggcaccnaaggctcatcattcaaaataaaacaaaataaaaaagtnttaaggcgaanattaaaaaaattttgcattacataatttacacnaaagcaatgctntcacctcccctgtgtggacttggganaggactgggccattntccttaaaaanaagtggggnggcttttangatggcaagggacttcctgtaacaatgcatntnatatttggaatgactnttaaaaaaacaacaatgtgcaatcaaagtcctcggccacattgngaactttgggggatgctngctccaaccgactggtgtca

SEQ ID NO: 1213 - DNA, 359 bp, Homo sapiens
cctagggggcatatcaagggtttaatagactgggggaatgggcaacagaactggctaccttagaggctctggaatgccccccacccatccacccaccaatggaaggaaagtcaggcatcgcctaaaaggagtggtccctatctagccccaagtctggagcagaaagggcaggtccattctggcccaagtgacattgttagatcctgtcccctcccccaatcactgctgcttgccagggtgcctcttcacagttcccatgtggcagcagtagtggcagaggcagaagtggacttattgtagattgcagtacagatacatggacacaatcatggcagccagctcgaggcccccaattccag

SEQ ID NO: 1214 - DNA, 595 bp, Homo sapiens
  misc_feature 574, 578, 582, 588: n = A,T,C or G
tgcatatcagttgagcttcatataccagcaatatatctgaagagctattatataaaaaccccaaactgttgattattagccaggtaatgtgaataaattctataggaacatatgaaaatacaacttaaataataaacagtggaatataaggaaagcaataaatgaatgggctgagctgcctgtaacttgagagtagatggtttgagcctgagcagagacatgactcagcctgttccatgaaggcagagccatggaccacgcaggaagggcctacagcccatttctccatacgcactggtatgtgtggatgatgctgccagggcgccatcgccaagtaagaaagtgaagcaaatcagaaacttgtgaagtggaaatgttctaaaggtggtgaggcaataaaaatcatagtactctttgtagcaaaattcttaagtatgttattttctgttgaagtttacaatcaaaggaaaatagtaatgttttatactgtttactgaaagaaaaagacctatgagcacataggactctagacggcatccagccggaggccagagctgagcactcagcccgggangcangctncagganctcggcc

SEQ ID NO: 1215 - DNA, 354 bp, Homo sapiens
agtcagtgccctgtatgctctccaggtgcactgctataacagcaacttcccaaaaggcatgttacttcgcttttttgtgcacttctatgacatggaaattattgaagaagaagctttcttggcttggaaagaagatataacccaagagtttccgggaaaaggcaaggctttgttccaggtgaatcagtggctaacctggttagaaactgctgaagaagaagaatcagaggaagaagctgactaaagaaccagccaaagccttaaattgtgcaaaacatactgttgctatgatgtaactgcatttgacctaaccactgcgaaaattcattccgctgtaatgttttcacaatattt

SEQ ID NO: 1216 - DNA, 505 bp, Homo sapiens
aaagtaaaaatttccagatgcctcaaaagcagtgagttcaatttggtgtcttgtgttctggcaaagaacagttaagtttacagcactgcagtcacagttttcaaatgctgtgaccaattatttgagagttataatctgcaggctccattttcaaaatatgtgggataacactgtcaattcgtatattgccaatgagacctttgaaaaacaattcttcagtgatggtagcattcatcagtcttaaagctggcaatctgagtagtagtctggataacctgtaggtgtcatctggatatgttttggttatataatcttggaattccacataagccttttcctgaaatttctctatctgttccatgttttctaggcttggatgatctggacagaagagtactattgccttcaggtaggcatattcgtatccatcaatgcagagtttaaccatgctgttacaaaactcctgtagtttgaagatgtgctccatcaataattttcttctttc

SEQ ID NO: 1217 - DNA, 458 bp, Homo sapiens
ctgatatctcctggtgctatccccaaactgccactctaaactcttgaagtaaataaataatctttgctggcaggactatgctgaatctccttaggcactctctaatcagatgtcctaggtcctcccaattcttagaccttttatacctgtttttctccttctcttattccatttagtttctcaattcatccaaaaccgtatccaggccatcaccaatcattctatacaacaaatgtttcttcttacatccccacaatatcaccctttaccacaagacctcccttcagcttaatctctcccactctaggttcccacgccgcccctaatcctgcttgaagcagccctaagaaacattgcccattctctctccataccacccccacaaaaattttcgccgccccaacacttcaacactattttgttttgtcttattaatataagaaggcaggaatgtcagg

SEQ ID NO: 1218 - DNA, 505 bp, Homo sapiens
ctgcaggaagaggtggaggggggcctgtcattatgtttcccccccaccccccaacgaaaggaaaactaagactcccaacataaacagggccttgaggggggggattacaggcacttgggcatggagtcttcggctgcaggaagcactccgcttattcttcaggaatgggaaaggcgtgacccaacgagagcatctgtctcagagctccactcagggtcacccctctccagaggccggtatggggtggcttcagacttccactgcacgacctggagcaccaagaccacacaccacaataccaaattcacccaagaagaggtttcagcattgtgtaggttggagtaaaactgcagagcagttccagggggtgtccatggaattttctgggcttcagaacagctaattgtagtgttcaaggagatgatggagttgcagagagacctggtgccaaatcgaaggatacaggcagacaccaagaccaggaagacggctatagctgagatgg

SEQ ID NO: 1219 - DNA, 363 bp, Homo sapiens
ccactgacaaaaatgacccccatttgtgtgacttcattgagacacattacctgaatgagcaggtgaaagccatcaaagaattgggtgaccacgtgaccaacttgcgcaagatgggagcgcccgaatctggcttggcggaatatctctttgacaagcacaccctgggagacagtgataatgaaagctaagcctcgggctaatttccccatagccgtggggtgacttccctggtcaccaaggtagtgcatgcatgttggggtttcctttaccttttctataagttgtaccaaaacatccacttaagttctttgatttgtaccattccttcaaataaagaaatttggtacccaaaaaaaaaaaaaa

SEQ ID NO: 1220 - DNA, 229 bp, Homo sapiens
aaactaacatgccccaaacagatgagacctcccaacttgaaaggatccctgcaccacaatgcaatgtttaagtacctgtgacaggcttctatgtcaaacaaacaggatgctctggttcttgtccattttcctagcttattacgataaagaatttctgatgattcccatgtttgacggtcgtccgaactgtccttagtagggcaggaagtttctgaagtgacatctttgg

SEQ ID NO: 1221 - DNA, 460 bp, Homo sapiens
ctgatatctcctggtgctatccccaaactgccactcttaactcttgaagtaaacaaataatctttgctggcaggactatgctaaatctccttaggcactccctaatcagacatcctgagtcatcccaattcttagaccttttatacctgtttttctccttctgttattccacttagtttctcaattcatccaaaaccgtatccaggccatcaccaatcattctatacgacaaatgtttcttctaacatccccacaatatcaccccttaccacaagacctcccttcagcttaatctctcccactctaggttcccacgccgcccctaatcccgcttgaagcagcgctgagaaacatcgcccattctctctccataccacccccaaaaattttcgccgccccaacacttcaacactattttgttttatttttcttattaatataagaaggcaggaatgtcagg

SEQ ID NO: 1222 - DNA, 315 bp, Homo sapiens
ctggccgacaagactgttttattgcaggtgcgttctcttgagagcgtggtggggcccatcttccctctccccaccctttagctagcccagcatggttctgaacaaaatgaaagtcttaagggccatagaggggaaagaaaaaaaaagagaaccagcacattacaaagcgaccatccccacatccattcctaggacgggccctcagggcggtgggtgcatcgtgaggagggagcggcatgggatgttagcaccaggtatttacagaacagctcgagagcgcttcaggaacgcgggcaagtccaatctgcagagtgg

SEQ ID NO: 1223 - DNA, 524 bp, Homo sapiens
  misc_feature 509: n = A,T,C or G
aaaaagctgggcatggtggcatatacctgtggttccaggtacctggagggctgacgtaggaggattgcctgagcccagcaggccgaagctacagtgagctgtgattgtgccactgcactccagcctgggcgaggagagcaagactctgtctcaaaaataaatacataaaatacagcgtccaaaagtgtgtcatcttctttctcttcacaattttataataagggggtaaaatgcctgtgagtctattcattatggaaaataaaaaagaaacaaccatttaaggctgaggcattttggttttctgctggcttttagattattaactgcattaagcccctcactataacttcaccagtatcctagaaacaatttgggtttcctttttaggcagggacaggaagtattcaaaggacagacatatggacagagttaggcccttcagggttgaagtctgtggtttcttgtgtctcaagactcaatgtcttgagaagttggtggaccctgtcctncatccaagaagtgct

SEQ ID NO: 1224 - DNA, 488 bp, Homo sapiens
ccacagaagttgctgctgacgctctgggtgaagaatggaagggttatgtggtccgaatcagtggtgggaacgacaaacaaggtttccccatgaagcagggtgtcttgacccatggccgtgtccgcctgctactgagtaaggggcattcctgttacagaccaaggagaactggagaaagaaagagaaaatcagttcgtggttgcattgtggatgcaaatctgagcgttctcaacttggttattgtaaaaaaaggagagaaggatattcctggactgactgatactacagtgcctcgccgcctgggccccaaaagagctagcagaatccgcaaacttttcaatctctctaaagaagatgatgtccgccagtatgttgtaagaaagcccttaaataaagaaggtaagaaacctaggaccaaagcacccaagattcagcgtcttgttactccacgtgtcctgcagcacaaacggcggcgtattgctctgaag

SEQ ID NO: 1225 - DNA, 64 bp, Homo sapiens
ctgtgctgtggagagaagctgatgttttggtgtattgtcagccatcgtcctgggactcggagac

SEQ ID NO: 1226 - DNA, 503 bp, Homo sapiens
ctcagagaaacaccaactgaaaagagccaggaaaacccgggaattttccaaaaggtcttcacgttaaacttgtcttatctcaggagagagcccgctcttgtctcccagttcctggtagggtctgcctgttggaaagtgtacctggatgcttctgggctccgtttggcaatagcaatcttggctgatgtgcacagtctggctcccagctcaccctttttttttaaagtaagaaaatagttgctaccgatagggactttgccaagtccaattatcttctaggattgaaaggtgcattttccccataaaaaaggcgaggaaaacccatggctgctttgtgtcacctcagtgacttacagtcccccttggcatttagttggtactagagccagtcatccttaacaaatcttttcacattttatttctttcacatgtagtcatcttcaaaaaggaaagatttggaattttagaaaaggggcaactcttctttttagcattctcatcag

SEQ ID NO: 1227 - DNA, 356 bp, Homo sapiens
caggaatgggctgagagtggtgtttgctttctccaccagaagggcacactttcatctaatttggggtatcactgagctgaagacaaagagaagggggagaaaacctagcagaccaccatgtgctatgggaagtgtgcacgatgcatcggacattctctggtggggctcgccctcctgtgcatcgcggctaatattttgctttactttcccaatggggaaacaaagtatgcctccgaaaaccacctcagccgcttcgtgtggttcttttctggcatcgtaggaggtggcctgctgatgctcctgccagcatttgtcttcattgggctggaacaggatgactgctgtggctgctgtgg

SEQ ID NO: 1228 - DNA, 154 bp, Homo sapiens
  misc_feature 58, 60, 62, 71, 97, 113, 130: n = A,T,C or G
aagctttttttttttttttttttttttttttttctttttttttttttttttttttttngnancccaaaggncctttattttttttttttaaaacctnttatgccatgaattcntagggaataggttccancagcccaggctccttcccattggt

SEQ ID NO: 1229 - DNA, 189 bp, Homo sapiens
aaatcaaatgataatttattctaagggtttttacaaaatacgaaaattttacatacataagaagaacagtataactgagcaacttacattctaattaaaactttgttgcaaaacatgtttgtgactactcttatgctgctttcatatagtaaagttataagaaaaacaatcatatatatgcagggtttt

SEQ ID NO: 1230 - DNA, 479 bp, Homo sapiens
aaatcctgagtcaagccaaaacaaaaacaaaaacaaaaacaaaacaaaacaaaaaataaagccatgccaatctcatcttgttttctgcacaagtcaggttttgtcaagaaagggtgtaacacaactaagtcacagtccgcctagaagcatttgaaggatggatgatggagccggactcatcatactcctgcttgctgatccacatctgctggaaggtggacagcgaggccaggatggagccgccaatccacacagagtgcttgagctcaggaggagcaatgatcttgatcttcatcgtgctgggcgccagggcggtgatctccttctgcatcctgttggcaacgctagggtacatggtggtgccgccagacagcaatgtgttggcgtaaaggtctttgtggatgtccacatcacacttcataatggagttcaaggtagtttcatggatgccacaggattccatgcccaggaaggaaagc

SEQ ID NO: 1231 - DNA, 325 bp, Homo sapiens
ctgagagtagacacttgtggtatgtggagtacagataagccaggggcaggccacggcacgctccatgaaagctaggagggagtgaaatatcagtgatcatcgcaaggaaggaggcagacaagagtaaggcacacctgactcttaggactagcagtcagaaccaggaggaaaggttttattgctatgcgggtaggtaagaacagattttacttacatccatatagttacttaaagtccagttttctgttaaacatttttcttaatatattgagccaaaactagtccagttaagctgaacttggtttttctggagatgaattgtttt

SEQ ID NO: 1232 - DNA, 316 bp, Homo sapiens
gtgacaggccgctgcggctctgtgctggtacgcctcatccctgcacccaggggcactggcatcgtctccgcacctgtgcctaagaagctgctcatgatggctggtatcgatgactgctacacctcagcccggggctgcactgccaccctgggcaacttcgccaaggccacctttgatgccatttctaagacctacagctacctgacccccgacctctggaaggagactgtattcaccaagtctccctatcaggagttcactgaccacctcgtcaagacccacaccagagtctccgtgcagcggactcaggctccag

SEQ ID NO: 1233 - DNA, 516 bp, Homo sapiens
aaaaagaatgacgtttacatataaaatgtaattacttattgtatttatgtgtatatggagttgaagggaatactgtgcataagccattatgataaattaagcatgaaaaatattgctgaactacttttggtgcttaaagttgtcactattcttgaattagagttgctctacaatgacacacaaatcccgctaaataaattataaacaagggtcaattcaaatttgaagtaatgttttagtaaggagagattagaagacaacaggcatagcaaatgacataagctaccgattaactaatcggaacatgtaaaacagttacaaaaataaacgaactctcctcttgtcctacaatgaaagccctcatgtgcagtagagatgcagtttcatcaaagaacaaacatccttgcaaatgggtgtgacgcggttccagatgtggatttggcaaaacctcatttaagtaaaaggttagcagagcaaagtgcggtgctttagctgctgcttgtgccgttgtggcgt

SEQ ID NO: 1234 - DNA, 218 bp, Homo sapiens
gctgtctagttttgtttttgttttgagatggagtttcactcttgttgcccaggctggagtgcaatggtacaatctcagctcactacaacctccgccttccaggttcaagcaattctcctacctcagcctcccaagtagctgggattacaggcatgcaccaccatgcctggctaatatttttttgtatttttagtagagatggggtttcaccatgttgg

SEQ ID NO: 1235 - DNA, 458 bp, Homo sapiens
gtggttgtcattgtgtgtctgtgtgtggttgtgtaactgtcatcgtgtggctgcatgactgggattgtgtggtttcgggaggtccgcgggtgtgcgtgtgctgtgcgtttgtgtgttgtgtgctcgtgtgtgtgctgtgttcgcgtgtgtgtgctgtgtgtgcatgtgtgtgctgtgtctttgtgtgtgtgctgtgtgctagtgtgctgtgtgtgcatgtgtgtgcgtgtgctgtgcgtttgtgtgctgtgtgctcgtgtgtgtgctgtgtgtgcgtgtgtgctgtgcgtttgtgtgtgctgtgcgtttgcgtgtgtgctgtgtgtgcatgtgtgtgcgtgtgtgtgccgtgcgtttgtgtgctgtgtgtgcatgtgtgtgcgtgtgtgtgctgtgcgtttgtgtgtgtgctgtgtgctcatctgtgtgctgtgtgtgctgtgcgtttgtgtgtgtag

SEQ ID NO: 1236 - DNA, 347 bp, Homo sapiens
aaaagctgttgaatgccctccacctcggaccacagccaggctccttgacaagcttgttggggagttcctggaagtgacttgcatcaatcctacattcatctgtgatcacccacagataatgagccctttggctaaatggcaccgctctaaagagggtctgactgagcgctttgagctgtttgtcatgaagaaagagatatgcaatgcgtatactgagctgaatgatcccatgcggcagcggcagctttttgaagaacaggccaaggccaaggctgcaggtgatgatgaggccatgttcatagatgaaaacttctgtactgccctggaatatgggctgccccccacag

SEQ ID NO: 1237 - DNA, 176 bp, Homo sapiens
ctgaggtggagactcgcaaggtggtgctgatgcagtgcaacattgagtcggtggaggagggagtcaaacaccacctgacacttctgctgaagttggaggacaaactgaaccggcacctgagctgtgacctgatgccaaatgagaatatccccgagttggcggctgagctggtgcag

SEQ ID NO: 1238 - DNA, 455 bp, Homo sapiens
aagaacctggattctgggcactgtgtcccggagcccagctcctcaggccagcgcctgtatcctgaggttttctatggcagtgctgggccttccagttctcagatctctgggggagccatggactctcaattacatccaaacagtggaggcttccgccctgggacaccctcactgcacccttacagatcacagcccctatacctacccccgggcccagcccctccctcagcactgctctctggggtagctctcaagggccagtttctggatttctccacaatgcaagctacagagctggggaagttgccggctggaggagttctctaccctccaccttccttcctctactctccggctttctgccccagtcctttgcctgacacatcgttgcttcaggtacgccaggatctgccatccccttcggatttttattctactcctctgcagcctggtgg

SEQ ID NO: 1239 - DNA, 505 bp, Homo sapiens
ccttttctctggctttcctcctttgccctgcagtagcaactggtgctgggacaagttgacccacctctcacagtcatgggtgtggcccacttgtgggagtctcctgcccacctcccagagacggccacccagcgggtctggcttcccagaaagttaactgatgattgtggggtttgtcatatctgggagggaagatgggtgctgggagagggttgggggcagggggcaaggaaaattgctacctgatttgttgaagatttttcctcttgccttacacatggaggttccaggaaacctcttgcagaacttcacacgtgattcttcaagccacacccacctgaaatcaaaccaaaggagtgctgtggctccccttgccctgccaccctttccctagtcttttgtagattgcactaatttacatcctagcaagaatcaacactgtatcagtccacggacctgctgagctgcagccacttgctctaggagctaaggacttgcattttca

SEQ ID NO: 1240 - DNA, 528 bp, Homo sapiens
ctgccggcatgggtgagtgggacccaggcctattacccggccagagggtttgggggcctctctcctggaagcctgctctttccacaccccctttcccagccaggctgtcttggacactctcggggctccgctgaggggcacatgattcccgctttggacttcttttgagatgtcattttaacactgaggcatcctggcctcccttcccggaagatgggttatttgcagtgctgtcttttcttttagtcccggtttttgtacaaaaacaatgatactccccattggactgtatttttgcccaagaaacaaaagtgcctcaacaggtacagttctgctggtcaatctgcttccggcagggctccatggtgacagccacgcccaccccactccggcccgatgtcattcgggtcacctcgctccaggtgtctgtatctgggtcgtaacactccacactgtccaggaacgtgtgaccatcatagcctccaaggacgtagattctcccctggtggacagtgatccccagggcac

SEQ ID NO: 1241 - DNA, 460 bp, Homo sapiens
ctgctcccaggatggtcgtgtgttcatttggacctgtggtgatgcctcaagcaatacgtggtcccctaaattgttgcacaagttcaacgatgtggtgtggcatgtgagctggtccatcacagccaacatcctggctgtctctggtggagacaataaggtgaccctgtggaaggagtcagttgatgggcagtgggtgtgcatcagtgatgtcaacaagggccagggctccgtatcagcatcagtgacagagggccagcagaacgagcagtgacaagacaggtggggcctggctccccacccgccagctccaggactgccccttcctgggccaactaaccagacaactgggaagagcccccaactccaacaggattattttcccaggaggagttacagatgcagccacagattgatcatctgccttaacgtgatcggagatgctttgtaatctactgtccag

SEQ ID NO: 1242 - DNA, 176 bp, Homo sapiens
ctgcaccagctcagccgccaactcggggatattctcatttggcatcaggtcacagctcaggtgccggttcagtttgtcctccaacttcagcagaagtgtcaggtggtgtttgactccctcctccaccgactcaatgttgcactgcatcagcaccaccttgcgagtctccacctcag

SEQ ID NO: 1243 - DNA, 380 bp, Homo sapiens
cctgcggcaccaccccatagagctggtgaggaagtaacttctgcttctcattgcaactgtagatccatcggggacgaacgaatgccagggaggggttgtccatcagggcctcctcaaagctgggatcccattcccgtgctgtgatcacaaactgaacccggtcactcatatagtcctcgagctccccattgaaggctgtggcgtatcggatgagtttccgccgctcgtccccagggaactccccgtaaagaaagaagtgcttgccctggaagaaatctgggagctcagggactggcagatcaggaggctcctggtgttcctcactgtccgtgttctcatccgtggagcctgcatacgggtcttccccattctcctcctgg

SEQ ID NO: 1244 - DNA, 532 bp, Homo sapiens
  misc_feature 502: n = A,T,C or G
aaaaaataattgagagttgtgacaacttcgattcttttcaggaggtgctgtcttaagatagaagaaagggatcaagctcttatcttagaaagcacagacacgtttagctcagggtagtgcaattcaatgctaagtggctgctccatgaaatctaagggccgggtaaggggaagaggcccagggacttcttccttgtctgacactctcgggactagcattctggcaggtcttacaagttataatacaaaaccatcagataaattctaatcacgactgtgtagttcctccccaaaataattttcctcttagaagtaaaatcaggaaaggggctgagttctgaaaagaaacatcggggctgtggcccaggccctctgagtgtggacgctgtcccccgtgtctccatgtttactgccttatcgtctcctttgtatgaaagtataatttacgtaattcgtccttggagaatcacagtggtgttcaagaaccttttgaggccatccangtttttgtccttcagtaccttgaaatcaga

SEQ ID NO: 1245 - DNA, 478 bp, Homo sapiens
aaagcctgacagaacagaaggcagtttatctcagcagtgaagggatggcagtaatgggatggcagtcagggtggaccagcagaatgggtgaagagatgtattggattggctgacttgctaatcggagctattcttttttttccccttttgaaatcaggtggagatgttacagccaaaaatatctggttggcagaaagtgttctggatatcctgacagagcaaagggagtgggtcctgaagagcggcatcctcattgccatggctgtttacacgtacctccgcctcatcgtggaccaccatgggactgcccagctccaggccctgcgacagaaggaagtagacttctgcatctcactgcttcgggaacggttcatggaatgtctgatgattggtcgggatctcgtaagactacttcagaatgttgctaggataccagaatttgaactgctttggaaagatattatccataatcctcagg

SEQ ID NO: 1246 - DNA, 479 bp, Homo sapiens
ctgaggaagctcttcattggagggttgagctttgaaacaactgatgagagcctgaggagtcattttgagcaatggggaacgctcacggactgtgtggtaatgagagatccaaacaccaagcgctccaggggctttgggtttgtcacatatgccactgtggaggaggtggatgcagctatgaatgcaaggccacacaaggtggatggaagagttgtggaaccaaagagagctgtctccagagaagattctcaaagaccaggtgcccacttaactgtgaaaaagatatttgttggtggcattaaagaagacactgaagaacatcacctaagagattattttgaacagtatggaaaaattgaagtgattgaaatcatgactgaccgaggcagtggcaagaaaaggggctttgcctttgtaacctttgacgaccatgactccgtggataagattgtcattcagaaataccatactgtgaatgg

SEQ ID NO: 1247 - DNA, 540 bp, Homo sapiens
aagcagcgagtcttgaagctctgtttggtgctttggatccatttccgtcggtccttacagccgctcgtcagactccagcagccaagatggtgaagcagatcgagagcaagactgcttttcaggaagccttggacgctgcaggtgataaacttgtagtagttgacttctcagccacgtggtgtgggccttgcaaaatgatcaagcctttctttcattccctctctgaaaagtattccaacgtgatattccttgaagtagatgtggatgactgtcaggatgttgcttcagagtgtgaagtcaaatgcatgccaacattccagttttttaagaagggacaaaaggtgggtgaattttctggagccaataaggaaaagcttgaagccaccattaatgaattagtctaatcatgttttctgaaaacataaccagccattggctatttaaaacttgtaatttttttaatttacaaaaatataaaatatgaagacataaacccagttgccatctgcgtgacaataaaacattaatgctaacactttt

SEQ ID NO: 1248 - DNA, 486 bp, Homo sapiens
  misc_feature 44, 95, 113, 138, 148, 151, 163, 197, 209, 239, 294, 313,388, 418, 425, 472: n = A,T,C or G
gtacaagctttttttttttttttttttttttttttttgctttgnatagtttattatacaaatgattgatagtaaaatagtgaattttaaagcttnttcctaacctttcattgngaatgaacagtgatgcagggagaanagacattcanaanaaaaatcatgtntgtattattaaactagaagtgataaaatgttcanaatgacaatgtntttaaaaaataataaccttgttggaattgnacatctatcattatcacaacatgcttatttgatgaagctaaagaaaagccagaanactaatatggctggatganaatagcattttaaaacattttcagcaaaattctaaaaatttgctgtttagttccaaaactgaatttcatacaagngctattattccaatagtttttttcaattgncactagngatcttgatccatatactgcaatcataatatccaaaataaaagagtntttcattaataaca

SEQ ID NO: 1249 - DNA, 240 bp, Homo sapiens
cctagctccaaccaagagtgtgctccagatgtgtttgggccctacctggcacagagtcctgctcctgggaaaggaaaggaccacagcaaacaccattctttttgccgtacttcctagaagcactggaagaggactggtgatggtggagggtgagagggtgccgtttcctgctccagctccagaccttgtctgcagaaaacatctgcagtgcagcaaatccatgtccagccaggcaaccag

SEQ ID NO: 1250 - DNA, 363 bp, Homo sapiens
ccagtgaagaggattcagagaaaataatacaaccatcaatcagaaaaaggaggggcgacaaaggaaaataattaggctgtagcctcaattgtgcattcccgtgcaaggtgccctgactcgccacagcggtaacagttgacttcacttgtcttgctgcagttgatggctacatgaccagtttcaccacacctatagcacttcactttggtgcagtctttttgaatgtgtccgaattctccacaagaatagcatttctgctcatctgcatggtcgcagtcacgagccagatggcctggtttgccacagttgtagcagcattgctctcgctctctcttgggctccttgcagtccttggcaatgtgg

SEQ ID NO: 1251 - DNA, 468 bp, Homo sapiens
ctgcagtcgcctagaaaacttgctcttaaacttcagggttttttcttccttcaaattttggaccaaagtctcatttctgtgttttgcctgcctctgatgctgggacccggaaggcgggcgctcctgtctttgtgctctttctaccgcccccgcgtcctgtcccgggggctctcctaggatcccctttccgtaaaagcgtgtaacaagggtgtaaatatttataattttttatacctgttgtgagacccgaggggcggcggcgcggttttttatggtgacacaaatgtatattttgctaacagcaattccaggctcagtattgtgaccgcggagccacaggggaccccacgcacattccgttgccttacccgatggcttgtgacgcggagagaaccgattaaaaccgtttgagaaactcctcccttgtctagccctgtgttcgctgtggacgctgtagaggcaggttgg

SEQ ID NO: 1252 - DNA, 324 bp, Homo sapiens
ccaggctggtctcaaactcctgacctcaagtgatccacccacctcggcctcccaaagtgctgggattacaggcgtgagccactgcgcctggctgagtacaatattaatgtagacaaaccatgaagtttattatttcatataagaacattacaggtttgttttttcttgcatgtctgtccacctaatgtttaagtagttctggtagctcttcctattctttattctatttgattccatttctgtgattcttttattaccactgatgttttgtgatagttaactatgataaatttaactgatcatgatttatcttctagagtattt

SEQ ID NO: 1253 - DNA, 400 bp, Homo sapiens
  misc_feature 57, 64, 115, 163, 170, 221, 241, 255, 294, 317, 319, 327,333, 335, 353: n = A,T,C or G
caagctttttttttttttttttttttttttttttttacaaataaatggggttattanacccaanagcagggtcagaaggagaaacagcaaaaacggggagtaagtgcccaggctnctgccccaaaccccttgaggaaaagagaaacaggtgttgggcaggaanaacagcnccaacagggaggagagggaggggattgggtcccggctctaccacggaccantcactttccccaggactcanttttgtcacctgtntaatgggggaagcacaatccttgcctgactccttccaanagcctcaattaggcttcggtgananagtgggtntggaananctttgcaaactgtaaagngcagtacacacatgcaggctagctgtggccctggggcccaggcccaa

SEQ ID NO: 1254 - DNA, 530 bp, Homo sapiens
ctgtaatcctcaggatcactttgcagtcttcaagattcagatacagaggaagcttcaattcaacctttcagagaagacattccagctcgcatgatctcatcaaccaagagaatgttggtggcaatcacagtgcaggagtgaagaagctgtttctttacacaatagttatcccatacgcctacttctgctgccaccattggctcacctgtgttcaggtccacacccacaagctgacctgattctgaatgttctgcttgaattttaactaatgtttcctgaaggtcaaaaccagagttctgagcaagaaccttgggaataatgagcaatgcatcagcaaatgcttggactccaagctgtgccctgccctttacactgggcttatgtttaatcagggcttctgccattgccacttccacggcaccagcacctggaaccacacagccatcatcaatagcatttttgacagccctcaagccgtccctcactgcatctttgatctgagtgagtgtgtgcttatttggtcctttgat

SEQ ID NO: 1255 - DNA, 314 bp, Homo sapiens
aaaaagttaactgtggcaccaattctaatgtaatccaacttgtgactgtttttttttgttttgttttgtttttgtgtgtgtgtgtgtgtggcactgggaaaagtggaaacaaacatgtattgaaatacatattggaaataaaaatggtttgagcgtcagtgatattctcccagaatgtacttatcttacctcggcatgtactgtagtcactcagtatttgtatatgttgctagaatttagattgcaaaatagtgaaattttaatgtgttcatttgtttttaatgtatatatgtcttgctcagattatttggttt

SEQ ID NO: 1256 - DNA, 512 bp, Homo sapiens
ctgagcggggacaacaaagagttcttctctgggaaaagttttgtctcagagcaaggatggaaaatggggacaacaaaggaaaagcaaagtgtgacccttgggtttggacagcccagaggcccagctccccagtataagccatacaggccagggacccacaggagagtggattagagcacaagtctggcctcactgagtggacaagagctgatgggcctcatcagggtgacattcaccccagggcagcctgaccactcttggcccctcaggcattatcccatttggaatgtgaatgtggtggcaaagtgggcagaggaccccacctgggaacctttttccctcagttagtggggagactagcacctaggtacccacatgggtatttatatctgaaccagacagacgcttgaatcaggcactatgttaagaaatatatttatttgctaatatatttatccacaaaaaaaaaaaaaaaccatggctaggtttatagatagttgggtggttggtgt

SEQ ID NO: 1257 - DNA, 50 bp, Homo sapiens
ctggccctccaggcccccgcccccatcccgtccacgttgctgtgtcgtga

SEQ ID NO: 1258 - DNA, 149 bp, Homo sapiens
  misc_feature 121: n = A,T,C or G
attgtagggctcgaccacggtgtcagacactttgggtgaaggcaccacactgaaggtattcatgatgcgatcagggtattcttctcggatcctgctgataaggagagtgcccattccagancctgtgccccgcccagtgagtgggtcag

SEQ ID NO: 1259 - DNA, 556 bp, Homo sapiens
cctaggggccgcaagacggctaatttattataatttctccttttttagtacatgcacagaaagcctgacagccaagtgtacatgaacatacacacacacacacacacacacacacacagaggccaatttccagtgaggaacaggctccacagaagaagctgataggcaggggggatcaaacgctgctcccctgctcaccgatctacttctccaaatacaatatcttgggtacctatgatggcaacgacatctgccaacatgtgtcccttagacatcttgtccaaaccagccagatgggcaaaaccaggagccttgatcttgcatcgataagggcggctgctgccatcagacaccaggtacaccccaaactctcccttgggagcctcaatggcagtatatgtggctcctggaggaacttggtagccctcagtatacaacttaaagtgatgaatcagtgactccatggaagtcttcatctctgctcgcttaggtggagacactttggcatcatcaaccttgatctccccaggaggcatcttgtttagacactgtgcga

SEQ ID NO: 1260 - DNA, 360 bp, Homo sapiens
  misc_feature 318: n = A,T,C or G
aaagctttgaaaagctactacttttacttctaatacatccagatgaacacgatgtagcaatatcagcttgtattccagagaaatctcattagtttttctggtgatggaaccacttatccacgtctgttggtactgtgcaggcagattcacagggtggtggtaaagcatccacaatggctctggcagcatcaggatcacacttgaaggggctctcagacaaagttgtattcatgcaactgattccttttccattcgttttcttagtcactaatgctttccaatggtcatgagtgcttttaataatatcaatggcaaagnccttatctttaaattctgcattaaacgcaaactcattttctg

SEQ ID NO: 1261 - DNA, 451 bp, Homo sapiens
ctgcagtgggcttggctttctgaggaaccaagtgtgtccacattgggggaacgtcatacttgatacacacttttttatctgcacaaagccagaattttcatgtctgatatatggtgattttcgtaagaaccagaactgctggcagaaagggggcacccacacgcttagatagccgatgtcttattagagggcagtttgtggtttctgatttggaatttaacattctccaaacattccagtacaatgaaagttttatccgctttcccatataaaaattcttcccatgagattgacttgattctcacaatcccgttggagtcgtgtgtgagtcctacagtgtgaggttcagcattgtcatctccaagtgctctccatagggaaacagtttctggtcatgatgagcttccgcttcccatatgatcccagcccggcctagctcggtggtgaacag

SEQ ID NO: 1262 - DNA, 332 bp, Homo sapiens
ctgctcagggggctgaggcaggagaatcgcttgaacccgggaggtggagattgcagtgagcccagatcgcaccactgcactccagtctggcaacagagcaagactccatctcaaaaagaaaagaaaagaagactctgacctgtactcttgaatacaagtttctgataccactgcactgtctgagaatttccaaaactttaatgaactaactgacagcttcatgaaactgtccaccaagatcaagcagagaaaataattaatttcatgggactaaatgaactaatgaggataatattttcataattttttatttgaaattttgctgattcttt

SEQ ID NO: 1263 - DNA, 198 bp, Homo sapiens; identical to SEQ ID NO: 578

SEQ ID NO: 1264 - DNA, 531 bp, Homo sapiens
ctgtagcaccaccatcctactcatcttccacatccccaatcatgcctcatcattgttaaaaggactcagaaatcacaagtgagaaaaatgaaacaaaagcagccatcccatagcttcagggtgagccttcacaggaccagatggataaagcagcagcactagtggaggtctgcaccttcctgcttttttacctatttagcttctaaaatttttcaacactgattttaagcaaggtctcgctctgttgcccaggctggagtacagttgctcactgcaacctccgcctcccaggctcaagccatcctcccatctcagcctcccaagtagctggcactacaggtgcgccaccacacccagctaatttttgtattttttgtagagacggggtttcgccatgttgcccaggctgatggtctcaaaactcctgagctcaagcgattctcccgcctcggcctcccaaagtgctgggattacaggcgtgagccaccgcgcccggcctgtacctttcttctgaatcttcttcttcttttt

SEQ ID NO: 1265 - DNA, 560 bp, Homo sapiens
aaaagactggatggatataaaatagaatcaactgtagtgttaggctgatcatgggaaatcaaagtaagtttgttttctcttgctgttccaacaattataggaaactatggtccaggaggcagtggaggaagtgggggttatggtgggaggagccgatactgagcttcttcctatttgccatgggtaagtagcttttgagttttacaattattattatcttgggagacatagctgcaggagtaaaagctttttaggatcatgttatctttccttaaaatctggttagatggataatttcataacctattttttttttactctttacttctgttgaaacaggcttcactgtataaataggagaggatgagagcccagaggtaacagaacagcttcaggttatcgaaataacaatgttaaggaaactcttatctcagtcatgcataaatatgcagtgatatggcagaagacaccagagcagatgcagagagccattttgtgaatggattggattatttaataacattaccttactgtggaggaaggattgtaaaaaaaaatgc

SEQ ID NO: 1266 - DNA, 616 bp, Homo sapiens
ctgctggctggctgggcccccgtagctggactggtttgacaagcccatgcctcccatcatttggctaccataagcaccaccgcttgctcctgctgtagaattcaagaagagttctacatatctgtgttctgaaatgagagaaaaggcatacaaaaggttagcttaaaaaaaagacactaaagtgatatttacacaaacccatgcctcccagcatttggctaccgtaagcaccaccgcttgctcctgctgtagaattcaagaagagttctacatatctgtgttgcatatttgctttgtcttttgacatagctgccacagcatcttcatgagttgcgaactcgacatctgcttcaccagttactctgccatcaggaccaatttcaatgtgtactctcacagggttgagcggtgaaaaaaaattataaatgtcattctcagtagctctgtaaggtaatccccgcatgtgtacacagtgtcctgttgtgctctggaaagtagagccaccatccccgtatctgtgatcagacattcctgaaaaacagtaattgaggtctcttccaaatctatctgacccaaatccatagccatcattatagccattgtaatcatcatagcc

SEQ ID NO: 1267 - DNA, 352 bp, Homo sapiens
ccaaggccagtgcctatctctcaaaacaactagacggggtttccaaaggctggcccccatggctaagggccctggcagcaactgccctgttagcacaagaagcagatgagctaactcttaggcaaaacctaaacagaaagtctccccatgctgtggtgactttagtaaataccaaaggacatcattagctaataaatgctagactaactagataccaaacctcgctctgtgaaaatccccgcataaccattgaagtttccaacaccctaacccagccaccttactcctggtaacagagagcccagttaaacataactgtttagaggtgctggactcagtttattctagtagg

SEQ ID NO: 1268 - DNA, 73 bp, Homo sapiens
  misc_feature 53: n = A,T,C or G
gtgtgtgtgtgtgtgtctgtgtgtgtgtgtgtgtgtgtgtgtgtgtgtgcgtntgtgtgctgtgtgctcgtgt

SEQ ID NO: 1269 - DNA, 517 bp, Homo sapiens
  misc_feature 500: n = A,T,C or G
aaattttagaaaacctgtataaattactggtgcataacttaaagattattctgcctttggctaattgagtaattcccctccagcactagagaccgctcagtgctcttactagatgaactcagtaacgccttgagctgggttgattgaggatgtgtgaaaagctcacagagcccgatgcctgctgctatttcacggcaatgagcctttttctttctacactgaagattttcttcttatttaatgtggtttattttgggctcagaaataattgctctgttgaaaataatcctttgtcagaaaagaaggtagctaccacatcattttgaaaggaccatgagcaactataagcaaagccataagaagtggtttgatcgatatattaggggtagctcttgattttgttaacattaagataaggtgactttttccccctgcttttaggattaaaatcaaagatacttctatatttttatcactatagatcatagttattatacaantgtagtgagtcctgcat

SEQ ID NO: 1270 - DNA, 144 bp, Homo sapiens
ctgggccgcacccttgggctctatgggaaggaccagcaggaggcagccctggtggacatggtgaatgacggcgtggaggacctccgctgcaaatacatctccctcatctacaccaactatgaggcgggcaaggatgactatgtg

SEQ ID NO: 1271 - DNA, 226 bp, Homo sapiens
ccattggcatcacagccaactttgtgaatggacgcaccgtggaggagacgcaggtgccggagatcagtggtgtagccaggatctacaaccagagcttcttccagagccttctcaaagccacagcagcaaaggagaaggaacctgtcccctcagggattaagcaagcacagccctagttgatcacccagcatgaaaagtcctggaatctctcagagatgaacctgtg

SEQ ID NO: 1272 - DNA, 602 bp, Homo sapiens
  misc_feature 567, 570: n = A,T,C or G
ctgggcatcgttgttggaattctggtggcccagatctttggtctggaattcatccttgggtctgaagagctatggccgctgctactgggttttaccatccttcctgctatcctacaaagtgcagcccttccattttgccctgaaagtcccagatttttgctcattaacagaaaagaagaggagaatgctaagcagatcctccagcggttgtggggcacccaggatgtatcccaagacatccaggagatgaaagatgagagtgcaaggatgtcacaagaaaagcaagtcaccgtgctggagctctttagagtgtccagctaccgacagcccatcatcatttccattgtgctccagctctctcagcagctctctgggatcaatgctgtgttctattactcaacaggaatcttcaaggatgcaggtgttcaagagcccatctatgccaccatcggcgcgggtgtggttaatactatcttcactgtagtttctctatttctggtggaaagggcaggaagaaggactctgcatatgataggccagaatgtgcttgccataggtgtacttacnaanagttgcgatgtggggccggatcttatgcatga

SEQ ID NO: 1273 - DNA, 539 bp, Homo sapiens
ccatcaagctgctggagtatgagccacgctcaggggagcaggtaccccttctcctaaagatgaagaggagcaaactggcactaagcaaggccatcgagagcggggacactgacctggtgttcacggtgttgctgcacctgaagaacgagctgaaccgaggagattttttcatgacccttcggaatcagcccatggccctcagcttgtaccgacagttctgtaagcatcaggagctagagacgctgaaggacctttacaatcaggatgacaatcaccaggaattgggcagcttccacatccgagccagctatgctgcagaagagcgtattgaggggcgagtagcagctctgcagacagccgccgatgccttctacaaggccaagaatgagtttgcagccaaggctacagaggatcaaatgcggctcctacggctgcagcggcgcctagaagacgagctggggggccagttcctagacctgtctctacatgacacagttaccaccctcattcttggcggtcacaacaagcgtgcagagcag

SEQ ID NO: 1274 - DNA, 451 bp, Homo sapiens
cctatctggttggcctttttgaagacaccaacctgtgtgctatccatgccaaacgtgtaacaattatgccaaaagacatccagctagcacgccgcatacgtggagaacgtgcttaagaatccactatgatgggaaacatttcattctcaaaaaaaaaaaaaatttctcttcttcctgttattggtagttctgaacgttagatattttttttccatggggtcaaaaggtacctaagtatatgattgcgagtggaaaaataggggacagaaatcaggtattggcagtttttccattttcatttgtgtgtgaatttttaatataaatgcggagacgtaaagcattaatgcaagttaaaatgtttcagtgaacaagtttcagcggttcaactttataataattataaataaacctgttaaatttttctggacaatgccagcatttggattttttt

SEQ ID NO: 1275 - DNA, 240 bp, Homo sapiens
aaaaaactggtttgtcaaatcacatacatgagcagatacacaactaccaaagtggcctgtaatagacaccagtggggcggtcaccacacagtacctgaaaaatacagctaaaaaaggaggagtctgttgagtatttaatttcagatctacttgactccttgttgaatggctttaagttagcatatagtgagtgagaggtagagtcccaagtataatagctgatgcctcagggctccattt

SEQ ID NO: 1276 - DNA, 397 bp, Homo sapiens
cctgatgcctcgatacagctagatgtacaaaaatatatcattcaaagtcatgaaaaccatcatcatattggtgtgacctccttcctccccttgggcacagcttttgcaactacctcctttgaaatctgggagttggtggggcaagggtcacttcttggcagcttcttcttgggcagccaaatctgcctccttctgagcagccaggaagatggctcgttccttctggaaagctgcaagctcttctgaactgaggtccttcaccacgcgaatgcccagagaacgggcagacccgatgatggagcggacaacagacgacaggggtacatcctgcagggcaaatgcctcatcctgagctttgatgcgggcaatctcatacacatgcttcaaggtcaccagg

SEQ ID NO: 1277 - DNA, 371 bp, Homo sapiens
cctgaatattttgcttaacagactgttggggatttcattatatgcagagcagcctgcaaaaggagaggtgtgaagcgaagatgtccgaaaactggctgttgttcatgaatctgaaggattgttggggtacatttactgtgatttttttcagcgagcagacaaaccacatcaggattgccatttcactatccgtggaggcagactaaaggaagatggagactatcaactcccagttgtagttcttatgctgaatcttccccgttcctcaaggagttctccaactttgctaactcctggcatgatggaaaatcttttccatgaaatgggacatgccatgcattcaatgctaggacgtactcgttaccaacacg

SEQ ID NO: 1278 - DNA, 84 bp, Homo sapiens
ccagaatggtctggatctcctgacctcgtgatctgcccgcctcggcctcccaaagtgctgggattaccggtgtgagccaccgca

SEQ ID NO: 1279 - DNA, 379 bp, Homo sapiens
ctgaaggagccggggagcagaaagtatatgtgtcaggtatgaggaagaaaatagattttggaagttatgagaaatgtagagagtgagttgagcatagtttgtgatttttagggcctctaacagtaccaaagcagcggcagccgctgcacgcagacatgagggctaggctaaaacagtaaggtcaagttgtttggacagaaaggctacagggtgcggtcctggctcttgtgtaagaattttgaccgcactaaccatgcctaggaaggaaaggagttgttgttttgtagaaggtgctggggtttgagagatcagttggccacgattggcagggagagcacgtgtgtttttatgagaattatgccaagataggtaacagatg

SEQ ID NO: 1280 - DNA, 423 bp, Homo sapiens
  misc_feature 28, 52, 197, 239, 328, 416: n = A,T,C or G
tttttttttttttttttttttttgaaanacaggctattttatttcaaaaaanaaaaaaaagtgggctctgggaacagggttagtccattcgggccttcagtgtcctggtggtgattttgtccttctcgatgatgtggacaatgactcccatgcctgacactgcatcccggtccacagcattcagcatggcttggganatggtttcaaacaggtgatccggatccatgttgggctcccanagggactcacacattccgtacatttgttcggcgcaggtgccactgaccacaaagtcatcagtcaccatggggcagccgatgaggtctanagagcaaatgaagggcttaaaggtcttcgggtccaacccggcaatgactggctcagtgtagtaagggccaaaccgtttctcatacaanaggttgg

SEQ ID NO: 1281 - DNA, 162 bp, Homo sapiens
ctgaaatttgtccttacagtcgagtccactgtagccaaatgcacacttttggcagttcccattagcatcttcctggtagccgggcacgcacgcacactcaggggccccaccactcttctttattaagcattgcttgtgctgtgcgttgcaggcatcaggaca

SEQ ID NO: 1282 - DNA, 206 bp, Homo sapiens
aaaacagaagcttatatacaacttagaatctaaaaccaatagatttatggtaaaccttaagactgaaccaaaacaaacaaaaaccaaagttttaatcatttaaaaatcatgtttattgaggtacaacttatagtaaaacctgcccttttcagcgtatagcactgagtcttgacaaatgcacagttatgtaccaccaccgaccaagg

SEQ ID NO: 1283 - DNA, 135 bp, Homo sapiens
ctgcggttaatccagcttgggcctgtctgcactgcgatcctcttgggctctcctaggatccccccatgccccgtaagaggtggaagacgcttccttccaggacagcaggctttgagtccagcaccccagcctgcc

SEQ ID NO: 1284 - DNA, 432 bp, Homo sapiens
aaaggatcacatgcgtgaagcaggtgatgtatgttatgctgatgtttaccgagatggcactggtgtcgtggagtttgtacggaaagaagatatgacctatgcagttcgaaaactggataacactaagtttagatctaatgagggagaaactgcctacatccgggttaaagttgatgggcccagaagtccaagttatggaagatctcgatctcgaagccgtagtcgtagcagaagccgtagcagaagcaacagcaggagtcgcagttactccccaaggagaagcagaggatcaccacgctattctccccgtcatagcagatctcgctctcgtacataagatgattggtgacactttttgtagaacccatgttgtatacagttttcctttattcagtacaatcttttcattttttaattcaaactgttttgttc

SEQ ID NO: 1285 - DNA, 153 bp, Homo sapiens
ctggtccttgcctgggagaactttgtggaaggaaaaggtaagattccttaagtccaaggagagaaccaatccagggtcaaatttcttttcattccctggatcacaacacaccagggaagagaggagtcaagaatgtctctccctgccagtgct

SEQ ID NO: 1286 - DNA, 188 bp, Homo sapiens
cctgggccccggtcacgtcgccaaccatcttcctgtccctagacttcacggagtaggcgaatgctatgaagcccagacagcaccagttcaagaagagggtgttgaacagggaccagacgacatggtcgggcacggaggtctcgctgtggatgttgatcacggtggaccttggaaggatggtgctgggg

SEQ ID NO: 1287 - DNA, 438 bp, Homo sapiens
aaaacaagcaaattttattaaaggaaaattttgcaggtttaaggtttgcaggtgaaattttgtaggtgaaaaggtttacttttcaccagtctgttctggcatgcttctaatgatgtcagagtcacctggatcaatgatagccagtgtgcacactctgtagtattttccgcatgctgtgcccagttcaatattattgccactgtagtgatggacaccagttttagccaacatagcatagtactctatttcagatttcctcaaagctgggcagttgttagcgagaatgaccaatttcgctttgccttgtctgatcatcttcagagtctgcttgtaccccaggacgtacttcccacttttcataacgagttggagcctagagttgatcgactccagcgactttttcgtcttctttgcggccaccatcttcctgccttagga

SEQ ID NO: 1288 - DNA, 312 bp, Homo sapiens
ccagtattcctggaggatataacactgacatcagcagggttttcaatggcaacaattgcacgagctgccagcagaagcttctcccaggtcctcttgagatttatgatatagatgccatcacttttccttttatagatgtactgttccatctggaagtcaagattggtgccacctaagtgggttcctgctgcaaggaacttaaggacatcctcctccttcatttgcaggacatcaagggctccggacattgtgaaaatttccctttaagttacgacgggaatccagaacaacgccgtatggacccctctgcag

SEQ ID NO: 1289 - DNA, 232 bp, Homo sapiens
ccacaaaacaccaaagaattgtaggcagtggcccctattgagaagttttccggtagagttggaaatcagttgtgaatacattctttgctagttggagtgcttgtttactaagcatgtgccgtcgtaggtattagtgctagtctcaaataggtgcttcccctgaggtgcaggggaagaccaaagtttgcaactcgaactgctttcgtccatgtttctcacattgctgtatttt

SEQ ID NO: 1290 - DNA, 93 bp, Homo sapiens
ctggcagggcatcatgtcaggccaccaaatccatccagaactaacatgcagtctctaatttggagactctttattgtgaccaaaagatttgga

SEQ ID NO: 1291 - DNA, 472 bp, Homo sapiens
  misc_feature 472: n = A,T,C or G
cctgacattcctgccttcttatattaataagacaaataaaacaaaatagtgttgaagtgttggggcagcgaaaatttttggggggtggtatggagagataatgggcgatgtttctcagggctgcttcaagcgggattaggggcggcgtgggagcctagagtgggagagattaagctgaagggaggtcttgtggtaaggggtgatatcatggggatgttagaagaaacatttgtcgtatagaatgattggtgatggcctggatacggttttggatgatttgagaagctaaatggaagatacaaggtccgaataaaaggaggagaaaaatgggtattaaatgtctaagaattgggaggacctaggacatctgattagagagtgcctaaggagattcagcatagtcctgccagcaaagattatttacttcaagagttaagagtggcagtttggggatagcaccaggagatatcan

SEQ ID NO: 1292 - DNA, 69 bp, Homo sapiens
ccagacctgaggcccacagacctggtccccacaaccaggattcctacaatgtacacattcctaattcag

SEQ ID NO: 1293 - DNA, 332 bp, Homo sapiens
gggaaactccgaggacagagggctaaatccatgaagtttgtggatggcctgatgatccacagcggagaccctgttaactactacgttgacactgctgtgcgccacgtgttgctcagacagggtgtgctgggcatcaaggtgaagatcatgctgccctgggacccaactggtaagattggccctaagaagcccctgcctgaccacgtgagcattgtggaacccaaagatgagatactgcccaccacccccatctcagaacagaagggtgggaagccagagccgcctgccatgccccagccagtccccacagcataacagggtctccttggcag

SEQ ID NO: 1294 - DNA, 207 bp, Homo sapiens
cagattgtgtacatagagcaatgttggttttttataaagtctaagcaagatgttttgtataaaatctgaattttgcaatgtatttagctacagcttgtttaacggcagtgtcattcccctttgcactgtaatgaggaaaaaatggtataaaaggttgccaaattgctgcatatttgtgccgtaattatgtaccatgaatatttattt

SEQ ID NO: 1295 - DNA, 342 bp, Homo sapiens
ccaccacttgtacccgatatggacttccggcttctctgtccaatggagccacactaaagatctcaccagtcacgtggtcaattttaagccaacctcttgtgtctcccctcagtgaatagcttatgtccagaccttctggatccttggcagtcacattgcccactttagtgcctatagctacatcctcactgactttcgcttggaatacgtgttgggaaaattgaggtgcttcattcacatctgtcacaataagcgtgaacttggcaaaagaacttgcattgtacttcacaccaaacactagaggctcaggattttctgctttgaacacaatgttggaaacag

SEQ ID NO: 1296 - DNA, 83 bp, Homo sapiens
ccaatgtggttggtcttcagcttgcagttagccaggttccataccttgaccagcttgtcccagccacaggagacgatgatagg

SEQ ID NO: 1297 - DNA, 147 bp, Homo sapiens
gacaagcacaccctgagcaagaaggagctgaaggagctgatccagaaggagctcaccattggctcgaagctgcaggatgctgaaattgcaaggctgatggaagacttggaccggaacaaggaccaggaggtgaacttccaggagtat

SEQ ID NO: 1298 - DNA, 381 bp, Homo sapiens
ctggtctaaaagagtatctgtgcattcctcacagagtgggtgatccacatctgtctggcccgacatgatgtcaaaaaggtccccagtgacctggaagtgtgggagagtcagggtagggcctcccccatgcttcctgctcaattacccactctcccagccaggcctactgcttgccaccggaatggggccggcttgccttcagtcttcggctgaggttctccatggtgccgccatcagatgcctccccaatcagagtgaagctgttggcactttctgtggacatcatcctgcagacagccccccgcccacgggccacatgagggaacagagaggcttcctccacctactacaatgccagtggcagagactctcaagcaccag

SEQ ID NO: 1299 - DNA, 396 bp, Homo sapiens
ctgctgcctgtggcgtgtgtgggctggatcccttgaaggctgagtttttgagggcagaaagctagctatgggtagccaggtgttacaaaggtgctgctccttctccaacccctacttggtttccctcaccccaagcctcatgttcataccagccagtgggttcagcagaacgcatgacaccttatcacctccctccttgggtgagctctgaacaccagctttggcccctccacagtaaggctgctacatcaggggcaaccctggctctatcattttccttttttgccaaaaggaccagtagcataggtgagccctgagcactaaaaggaggggtccctgaagctttcccactatagtgtggagttctgtccctggggtgggtacagcagccttggt

SEQ ID NO: 1300 - DNA, 577 bp, Homo sapiens
  misc_feature 469, 474, 475, 524: n = A,T,C or G
cctgtaattagattgttagctcttcgtggctcttcaatgtcttttgaacatgtgggagatacttaataaaaagcatagctctaggacactataaaaattgctaattactccccttggaataaagacataagaacatttgcttaagatttaatatgttatatataggcttgggcatacagcagtgaggggtggggagattttgaaaagttctggtttgtcatttatgtagctggtagttttgttttgaacctgttatgagcaaccaccggaataatctgttccccatagaaactgaacctaaacttcaaatttttattatctaagctataataataggcggagtcgatctggaacatacagctcgagatcaagaagcaggtcccgcagtcacagtgaaagccctcgaagacatcataatcatggttctcctcaccttaaggccaagcataccagagatgatttaaaaagntcaannagacatggtcataaaaggaaaaaatctcgttctcgatctcagagcaagnctcgggatcactcagatgcagccaagaaacacaggcatgaaaggggacatcat

SEQ ID NO: 1301 - DNA, 533 bp, Homo sapiens
cctcatagatgccatcaagcctttcctcgactattatgacctggtggatggggtctcctaccagaaagccatgttcatatttctcagcaatgctggagcagaaaggatcacagatgtggctttggatttctggaggagtggaaagcagagggaagacatcaagctcaaagacattgaacacgcgttgtctgtgtcggttttcaataacaagaacagtggcttctggcacagcagcttaattgaccggaacctcattgattattttgttcccttcctccccttggaatacaaacacctaaaaatgtgtatccgagtggaaatgcagtcccgaggctatgaaattgatgaagacattgtaagcagagtggctgaggagatgacatttttccccaaagaggagagagttttctcagataaaggctgcaaaacggtgttcaccaagttagattattactacgatgattgacagtcatgattggcagccggagtcactgcctggagttggaaaagaaacaacactcagtccttccaca

SEQ ID NO: 1302 - DNA, 232 bp, Homo sapiens
aaatattaacgcacactttttttttattatattaaaatcaggcaatggtctgacaataaaaaggctgcttatggaatactgttatgttaaacttcacttacaggatgttaaatccttagaactaaggttttccccccagaaaaagattaatggaaacatcaattgcttttcagacttgatagttgctgcttcaaaaggtggttttacacaaatactaaattaaaaaaaaaaa

SEQ ID NO: 1303 - DNA, 422 bp, Homo sapiens
gttatttaaggaggaaaaaatattaaattttgaattgagtgtgtaggctccctatcattatatatagagtttctttttccacggtagtcagtgacttaacctgaattgtaaatgtttgtaaagggttaattgtcctacatcaaacttagttaaataattccatccacttatggaggaggaggagaatgtggaagaggtaaaaagctgggcacaagttcatatgcctatgagtcagtaaagactgaagtaatgtcctatgttgagctggttattttgatatatgataataattatctttgaagtagaacaattctgttaactggaaaatcacaggatatatccatcatatttttcaggacagatagtttttactgtggggcaaataggttaaaattacactatgttagttgcatttaggtttt

SEQ ID NO: 1304 - DNA, 495 bp, Homo sapiens
  misc_feature 454: n = A,T,C or G
ccactggagtttatttggttgctgacggcttgactgaactggacaaggttcccattaggcaactgcactgcaccattcacggtgctatctatgctggtttcctctttcaagtccacgctgggaagcctctctctctggagcttcctccaaatctccaagtttgaatgagactgttctctcctccaccacagcctggaggggcacagtggcaggccctacctcagaaacaggatgcttgttttcaatatcaccaacagacaactttgtttcttcatggtcttctttcaagctattctttttttccattaaggggctttcagaaggactacactttatttctcgttcaatttttctcttcatcctgggacatacaaagaaccagacgataagggcacagaaaactgcacatcccaccgagatgaggatggtaccccacagaggaagtttgtcaaancccagcactaggagataaaatggtgcatcttgaaaacccca

SEQ ID NO: 1305 - DNA, 336 bp, Homo sapiens
tggggctgctcttgatatcagtgtgaaggggcctgcctttaatatggcatctcctgagtcagattttggcatcaacttgaagggcccaaaaatcaaaggaggtgcggatgtttcagggggtgtcagtgccccagacatcagccttggtgaagggcatttgagtgttaaaggttccgggggtgagtggaagggaccccaagtctcctctgctctcaacttggacacatctaagtttgctgggggccttcatttctcaggaccaaaggtggaaggaggtgtgaaaggaggtcagattggactccaggctcctgggctgagtgtgtctgggcctcaagg

SEQ ID NO: 1306 - DNA, 101 bp, Homo sapiens
ctggtgcggcccggtgtggcccagcccgaggacaccgtgcagttccggatccccatggaaatgacaagggtggacctcaggaattacctcgagggcatcta

SEQ ID NO: 1307 - DNA, 369 bp, Homo sapiens
ctggagaccgacaggatttgccatgcatttgcatcttgctagagtttggtttttatgaaagggcctattttttttaagttggcatattttgagtggaaacactcaccctaccaaatatacttaagttgcaactctaaaagcataaggacattttcaaattttctcttcttcaactgagaaaatgaatgtgccaggtgacatattatatacttgtacttgcatacacatagaaatatatcactgtgcaaattcgtccttgactttataactgaatttcacctcaaattatacattaatttgcagaacaaaatattaggaatgggcacaaatctgtggttcctgattttggtcattttcaatttctgtagg

SEQ ID NO: 1308 - DNA, 145 bp, Homo sapiens
  misc_feature 120: n = A,T,C or G
cctttctccaccaaggaaaaaacgagaagaccccaaaaccaggagagactctgtggactccaagtcttctgcctcctcctctccaaaaagaccatcggtggaaagatcaaacagcagcanatcaaaagcggagagccccaaaaca

SEQ ID NO: 1309 - DNA, 514 bp, Homo sapiens
  misc_feature 492: n = A,T,C or G
ccacggggactgttattcgcaagctggttttctagacctgttagctggaagcatggtgagcaccatttctggacgctcaggccgtgtcgggcttcagtcatctccaccacacaggtacagcagcgctttctggtagtcgcccttagtgtcttgctggatataatagtacagggacttgccgtactttctcttgaattcagacctaattttcaacatgtccacttcactgcgggagaccatgattctgatcaggaccttatctcgcgcccccttgcccttcatggagtcatacagccgatcagcaaaatacaggggcttgttctgaatgcactgaaccaggttcaggaaagcattttccaggtctcctttaacctctttcctgatgctttccaacatgtcataagggctgtaactcttgtacctatcaaatactttctggaggtggggcacgctccgctcggtcatgatgctgatccacttgggaacatcagntcctttcctcttcactccagcg

SEQ ID NO: 1310 - DNA, 199 bp, Homo sapiens
aaaattacatttgtagaagtcacacaacagaaagataccatgcggttgaacagtgtgcctgtacttgaacaagtgagagaagatacatactccaaaaaggagattcagtctagtgttacttcagttattcacatagtgtctacagggcagaatctcttccaaagcaatttttctgttcactaatctacaggcactaatg

SEQ ID NO: 1311 - DNA, 307 bp, Homo sapiens
  misc_feature 95: n = A,T,C or G
ccaccttctcactgtgttctcacagggtctttcttctgtgcctgtccctcgcagcagtctctcccggctctcttttgaaggagattggagtgcanaattggctagtctgaggtttcagtgtgcaagacgtagtcagatggctcacatttggaaccctggtagtaatgttttattctttgtccgatggcattgggcgggttgacccagcctgcagtcaggatttccttgtaccgttcacccgggagttcagaatcgcactctggctgaaagttcagcaagagcaccattgtcagcctgactgccctgt

SEQ ID NO: 1312 - DNA, 483 bp, Homo sapiens
aaagacatgccaatttgaaaaggcatcaaagtaaaaaaataaaagcaaatgctaaaaactactttacaataaaaaaattaaataatcggcaggttaaatgaatgtaaaatgaggaatgtacagtgaaaaacaaactaatataaagcattccagttgataaaaacctcctcaggcttatggtctgttttccaaggaaattatgtttcaatgtaaagtttgaaatactccagacatacattccatgtaggttttgggtgccaatgttaaaatttcaaattttgcatgcaaggcttagcaaagaaacactggcagaattccagcatttgcaaaattctaagttttggtgaatattgtaaatattacaattggtattagaaagccatgatgaatccagaattaagagaaaacccatttcataaatattttgtttgattaaaaaataccaggcttaccatgttctaaataactcaagaaaatatcttt

SEQ ID NO: 1313 - DNA, 471 bp, Homo sapiens
aaaataggttgttggagctttcctcaaagggtatggtcatctgttgttaaattatgttcttaactgtaaccagtttttttttatttatctctttaatctttttttattattaaaagcaagtttctttgtattcctcaccctagatttgtataaatgcctttttgtccatcccttttttctttgttgtttttgttgaaaacaaactggaaacttgtttctttttttgtataaatgagagattgcaaatgtagtgtatcactgagtcatttgcagtgttttctgccacagacctttgggctgccttatattgtgtgtgtgtgggtgtgtgtgtgttttgacacaaaaacaatgcaagcatgtgtcatccatatttctctgcatcttctcttggagtgagggaggctacctggaggggatcagcccactgacagaccttaatcttaattactgctgtggctagagagtttgagg

SEQ ID NO: 1314 - DNA, 237 bp, Homo sapiens
  misc_feature 160: n = A,T,C or G
aaaaaaacttccatgcccttccattcccctccctccaaactaggtattgtccaagttgtatcaaatgccacaaagtctaccatgcacccagaagcagagaagacaggaggtccagaggacaaggtatgctggggtcactactcgcactgcagagtccacncgagttaactcatgctgggggcaaagaatggaaagagctaatacacagacaaagcaaaagaacgaaatgcgcagcct

SEQ ID NO: 1315 - DNA, 312 bp, Homo sapiens
aaaaaaaaaaaagtcaccagcaagtagtcccgggtgggaggtgggagcagaataaaaaaaaatctgcaatgattcctaattgtttttcaatacagaagcttgggaaggggtttctgccagtttcatgaggaaggcacaacttccaggtagtgttggggaagggtatgaggtcctatgcaggctggcctcttatcccacagatgccaagatgatgtctactggcagctcctccaaacttctggctgtcacctgcattgtcactgtgtccaaaagcagcagccgggagcgcaccaggatgtcatgaccaccccg

SEQ ID NO: 1316 - DNA, 425 bp, Homo sapiens
  misc_feature 26, 42, 73, 98, 110, 173, 186, 206, 214, 230, 243, 266, 276,287, 317, 335, 337, 360, 418: n = A,T,C or G
gcaacctccacctcccgggttcaagngattctcctgtctcancctcctgagtagctgggatcacaggcgtgcnccaccatacccggctaatttttgtnttttcagtaaanacggggtttcaccatgttggtcaggctggtctcacattcctgacctcatgatccacccacctnagcctcccaaagngctgggattacaggcatganccaccgcncctggcctgtttacanactttacaaacanattttgtttacaagctttacacncacggttcanttgcagttagngtatattatgctgggcccaaaacaaatgtnttttttttttttcccagngnggcccaaggaacccaaaatttanacaaccctgctctaaagggtttgattcatgtttccactgggttatgcttattgcctgnaattcca

SEQ ID NO: 1317 - DNA, 172 bp, Homo sapiens
aaaaagatctgcttttatacagaaattgaaggatgccatattatgagtgctttaagattttattctactgacttctaaaactgttaatatatctttttttaaataaaaaaaaaagtttgctgtcttttttaaaaagcaatcctcaaactctctagccacagcagtaattaag

SEQ ID NO: 1318 - DNA, 135 bp, Homo sapiens
cctagagagctagagaagcaagtaagggccagggccagagtcggcttcaatggaacaacagcccagtgccctaaggcccctaactcttgctggctgtttcttgaccccaagccagggttgggagtcctctgggca

SEQ ID NO: 1319 - DNA, 294 bp, Homo sapiens; identical to SEQ ID NO: 71

SEQ ID NO: 1320 - DNA, 125 bp, Homo sapiens
ctgcctaagtagaggacaaagactttctcctttcaaaggagaactgagtccaggattggtaagtttaaggcacttaaccttgaccagctctgtaggtctggagcattctggtccctggccgcttt

SEQ ID NO: 1321 - DNA, 186 bp, Homo sapiens
ccttcctaaaaaatagtggtgagctggaggctacttccgccttcttagcgtctggtcagagagctgatggatatcccatttggtcccgacaagatgacatagatttgcaaaaagatgatgaggataccagagaggcattggtcaaaaaatttggtgctcagaatgtagctcggaggattgaatttc

SEQ ID NO: 1322 - DNA, 84 bp, Homo sapiens
cttgacgttgacaatcgagtagtactcccgattgaagcccccattcgtataataattacatcacaagacgtcttgcactcatga

SEQ ID NO: 1323 - DNA, 97 bp, Homo sapiens
tgcagcagaccgtaaccattatagacgctatccacgtcgtaggggtcctccacgcaattaccagcaaaattaccagaatagtgagagtggggaaaag

SEQ ID NO: 1324 - DNA, 437 bp, Homo sapiens
aaaattacatcagctttgttatcctggtagtctcggagaccaaccaaaataatgtccgaggtatttatccaaaccttttttctcaattttcctctgatgtgacataacctctttacaccatcgaaacacattgcttctagccgtccatttcccaacattttgattacctgagcatactcctgaccatcttctttgaataccagttctcttttttcagattcattctcattcttacccctgcgtctgtttttacctcctttacctttattcttgggcatggcggtggcggcgacctcgcggcgtctctgacttctttccgggtagcggcgaccgcggcggctgctgctccgaggggcgacacgagggagcgcgcgggaccaagtaggtgctggaggccaggcaacgtgcgcgggagaggctggcgacccagctcttca

SEQ ID NO: 1325 - DNA, 527 bp, Homo sapiens
  misc_feature 498: n = A,T,C or G
ccacttctgtaaaatccaaaccactccgaatctacagggtccacaatggaatcattgaggaatttcaccatcacaaacttcttcagggccatcaggtttttcttgtaggactcattgataccccgctcctgatttatatctgccaagaagatgctgtggttgcgatacacatcctcctttatggggtcatgccagtattcggcttgcacgaggcgttcctgaacaactttggagtacgccccagcattcagtgtttttcggatgaagtcacagatgtgagagctctctcctgggcatcgagggagtccaaaaacaccttgatgttgtcccccaaccgagatcagattgatcatgggaggtgaagggcatctctgagccactgccctcagaaattggcctccctgggagaatcccatagcattgtagccttgctgcaatttaggatccttagcaagtgcctgacacactgttgttacttgggaattgacattcaagaanaagctgttctccacgtcctccatcagggt

SEQ ID NO: 1326 - DNA, 330 bp, Homo sapiens
ctgcagccgcagcctgtggctgtgcagggccccgagccggcccgggtcgagaaaatatttacaccagcagctccagttcataccaataaagaagatcctgctacccaaactaatttgggatttatccatgcatttgtcgctgccatatcagttattattgtatctgaattgggtgataagacattttttatagcagccatcatggcaatgcgctataaccgcctgaccgtgctggctggtgcaatgcttgccttgggactaatgacatgcttgtcagttttgtttggctatgccaccacagtcatccccagggtctatacatactatgtt

SEQ ID NO: 1327 - DNA, 512 bp, Homo sapiens
ccactaaaattcatattgagattatcttggtttcttggaagagataggaatgagttcttatctagtgttgcaggccagcaaatacagaggtggtttaatcaaacagctctagtatgaagcaagagtaaagactaaggtttcgagagcattcctactcacataagtgaagaaatctgtcagataggaatctaaatatttatagtgagattgtgaaagcaaccttaaagttttgaagaagactgatgagactaggtgctttgcttcctttcatcaggtatctttctgtggcatttgagaacagaaaccaagaaacatggtaattactaaattatgaggctttgctttttgtttgcttttaagtagaaaaacatgttggcaacattgagttttggagttgattgagataatatgacttaactagttttgtcattccatttgttaaagatacagtcaccaagaatgttttgagttttttgaaagaccccaatttaagccttgcttatttttacctg

SEQ ID NO: 1328 - DNA, 120 bp, Homo sapiens; identical to SEQ ID NO: 596

SEQ ID NO: 1329 - DNA, 309 bp, Homo sapiens
aaaaatctgaaatagtaaattaaatataaaaatgtaaactctgaaaggagagaaaataagaataaatatgtgtaaaggtaatgcattaagatacaaaggatctcacagaggttaatattttacaacactaaaaaaaaataaaatgctctatatattttcttagttgggacattttgtttcaatttaatttttggttatgttaacaaaaattacctctaaagaggatgttaaaaaaatagcaatgacgttaccatcttaactaatgaatatcctatcaccctaattttttctaaaagaaatggatttttt

SEQ ID NO: 1330 - DNA, 221 bp, Homo sapiens
ctgttgcaatcaaggccatggcaaaataactggctcccagggtggcggtggtggcagcagtgatcctctgaacctgcagaggccccctccccgagcctggcctggctctggcccggtcctaagctggactcctcctacacaatttatttgacgttttattttggttttccccaccccctcaatctgtcggggagcccctgcccttcacctagctcccttgg

SEQ ID NO: 1331 - DNA, 103 bp, Homo sapiens
cctgttagaaaagcacccacccaagcctcctggcatcagctaagccattggcattgtcgccattcccacagggacatccgcagaccatcgtgagataaggctg

SEQ ID NO: 1332 - DNA, 453 bp, Homo sapiens
agaatttcagagctgaagattttagaagcaaagcaaacacattctggatacacgtgagatccaagtggtgactgtgctactgagaagctgaacgaaatggaaagcaaagcctgttggagctgaggtcaaagaatgtgaagccagagtggatactgaatgggaaagttaataacaaggatgtggaagctattgaggagacggagtgcgcctaaagagctgctaagccacacatctcttgagacccagaagctcgatctgatgactgaagtgtctgagctgaagctcaagctggttggcatggagaaggagcagagagagcaggaggagaagcggagaaaagcagaggagttactgcaagagctcaggcacctcaaaatcaaagtggaagagttggaaaatgaaaggaatcagtatgaatggaagctaaaggccactaaggctgaagtcgcccag

SEQ ID NO: 1333 - DNA, 174 bp, Homo sapiens
cggccgaggtaaagtagtcttccgtggttgggaagcctcacctcccaagaccagagtcagttggagctggttgttgttggaagggagtgggttggggaactggggtgggggcagggagatccccccgctctgctggcggtcctaggtggagaagaactgcacttcacagagtct

SEQ ID NO: 1334 - DNA, 329 bp, Homo sapiens
cctgcaggggatgggaccttccagaagtgggcgtctgtggtggtgccttctggacaggagcagagatacacctgccatgtgcagcatgagggtctgcccaagcccctcaccctgagatgggagccgtcttcccagcccaccatccccatcgtgggcatcattgctggcctggttctctttggagctgtgatcgctggagctgtggtcgctgctgtgatgtggaggaggaagagctcagatagaaaaggagggagctactctcaggctgcaagcagtgacagtgcccagggctctgatatgtctctcacagcttgtaaagtgtgagacag

SEQ ID NO: 1335 - DNA, 484 bp, Homo sapiens
  misc_feature 458: n = A,T,C or G
ctgccactatgtggtcagtttctaccttcctgccgtctttcagcttgataagtaacttgccactgctgactccaacggattgcacaatagcattgggcatcaccttaaccccctctcgtctgactttttccatggtccagttgctgaggtattcggggaggatctttcccatatttcctttctcggggaagagttgaatcacttctgtgcccaaggctcgagcctttctgccaagagcacaggccagttcgctaccaaggaagcccccaccgataatcgtaattgatttgacttcccgtgaaatcttctccaagcttctaaagtctccaatctttctgaaaagcgttgttctactcttcacctctgctccagccctatcaatggcagacagacttcttggagtacctcctgttgcaatcaagcacttttcataggttatttgagagccatcattaagnttcaccatgttgtctctcacatccag

SEQ ID NO: 1336 - DNA, 590 bp, Homo sapiens
  misc_feature 542: n = A,T,C or G
tgctgggattggaggtgaaaaagctggcggttttgccccgtattatggagatgaaccaatggatttcaaaatcaacaccgatgagattatgacttcactcaagtctgttaatggacaaatagaaagcctcattagtcctgatggttctcgtaaaaaccccgctagaaactgcagagacctgaaattctgccatcctgaactcaagagtggagaatactgggttgaccctaaccaaggatgcaaattggatgctatcaaggtattctgtaatatggaaactggggaaacatgcataagtgccaatcctttgaatgttccacggaaacactggtggacagattctagtgctgagaagaaacacgtttggtttggagagtccatggatggtggttttcagtttagctacggcaatcctgaacttcctgaagatgtccttgatgtgcagacctgcccgggcggccgcccgggcaggtccacagtcctcccatggagggcctgccgtgacgctcagtggagagggcagggcctgtgtctccacttangccacacagtgatgaggaaaccacagatggagcttcttgccgataata

SEQ ID NO: 1337 - DNA, 419 bp, Homo sapiens
ctgacgcgtcatttcagcatttttccagccttttttgaagctctttaggaagccttcccgtggaggtaatttgtccaggtcatgtacaacacgctgggggattttaagtacagtgcgtactgctggaatccggagacaggatacttggaccagggaaaacaaattggaggagagccagtacataaacactgccgtggggaaatgcatggttatgggcaaggttatcaggggcatcattctgatgacatttctcatccactgaaggtcagaactttgcacacctgtctcagcacctagctcaagaacagcccacattgtagcagtgactgccagtggtaatatgtagatgggatcggataccgtgagatcctggaaccaccagaggccacctgtctgcaggctgggcacaggaaggttgg

SEQ ID NO: 1338 - DNA, 397 bp, Homo sapiens
ctgaggccgagcccaactaggtcctgggcacccctgcaggtgggagtggtccttgtcctcctggtatccagcagacacccccctctccccaccagccccattctcaggtcctttcctctttgtcaccaacaccaagaatctgtccagggttcttggcttatcttttatctcttttcactcctagagaggaattgcaattgactcagaatgacacattttggcaccacgtgtgtagaaagcccccactgttagatgatagcctcgtgaaattcatgtttctgtattctcctatttcttttcaaaaactaatttttttttttagtgtaataaatcctaagagggaactgatttaagaaacaaggccgccaaacaaaggcagcagttccgactccagcag

SEQ ID NO: 1339 - DNA, 527 bp, Homo sapiens
  misc_feature 435: n = A,T,C or G
ctggtcacccaactcttgtggaagaggggaattgagatcgagtactgaatatctggcagagaggctggaatccttcagccccagagcccagggaccactccagtagatgcagagaggggcctgcccaggggtcagggcagtgggtatcactggtgacatcaagaatatcagggctggggaggcatctttgtttcctggtgccctcctcaaagttgctgacactttggggacgggaaggggtagaagtagggctgctccttttggagctggagggaatagacctggagacagagttgaggcagtcgggctgtccaggttctaagcatcacagcttctgcactgggctctgaggagattctcagccagaggatcccagcctcctcctccctcaaatgtcagtccaagcaaataccaaagcaacgcatcgattttgtngaagtcaattagagatgtggggagctatcggagacaagcactattgtaccttttcacctccacacttgtcacaagcagggactgtctcctcc

SEQ ID NO: 1340 - DNA, 348 bp, Homo sapiens
ctgagctgcaggatgggcgctgggctgactggaggggtagacggggtggggtctgaccccattagcctttccccatccaacctgggcccccataagccattctctggccctctgcacaagacagactcagcaaatctgcgaggtatggggattctgccaactccccacctcgcctcaccttccctaggtctgccgggtgacccaatccactgggtgcagccccacccctgctcaaccccacatctggacagacacatggcaaatatggaactgaagcccggctgggctggagcacatctggttgttgttgggttggagtcgtcttgcaggtgtcccaaggtggtcagg

SEQ ID NO: 1341 - DNA, 124 bp, Homo sapiens
gaaataaaaaaataggctttgtgtatggttaaactgtaaatcttatgtttacaaaatactgtaattttcaggaaatcactgtattaggaatgtgcaatgacttatataaataaaagccattttt

SEQ ID NO: 1342 - DNA, 415 bp, Homo sapiens
aaatatcttcattttgatctatcattaatggagaaatattccgtctaccatgtatataaggactttcagcagatgaaatgcttaaatagtttaagggtggaaatgaatacagcaattagaaataaggggttgataaaatatgcatttagttttgctgttacagttaaagaagcattttttaagaaagactttctcatttatctactttgtgcaataaaacttaatttttgttgttgtgatttatcttacaaaggatactgtatactgttctctttcccaaactaaagtctaaatttgcactaaaaaaaaatcatgcatgatgaaaagaccagcctacttaaatgtgcttggagtcctttcatgttggcatggatcaaagcctgagtatcccttcaaacattttccagtttgccag

SEQ ID NO: 1343 - DNA, 555 bp, Homo sapiens
aaaagttattatttttttactctttcttttctttggagagggtaccaaaggatagctgttctgtttaagtagggacctctcatggcctacaggctttgacatctgagaatcaaactggagaacattccgaagccgttcttataagtgcctccatctctacctgggctgaaatggaatgtgcaaatgtagcccagcctggtccttgggtgttgccagttgattgatgactgggagccaaagtggcatctcctttgacctaaacgggcgatgatgaaataaaactcaacagcctttctctcatcttgcattgtgagatgcgaaatagagcgtgtctctctgcctctcattttaggctgaggccgtccaaagcggccatgccccatgtttccactagatggcgctgacacttcaggcatcaaccctcatggcctctcagccttgcaaaggcagccacttaaagtcggtgtcctgtgtggggcaccaagctgagctgcagacacccagtaggcgcgaggcaaatgcgtcccattttaagaggcttgtatttatgagctc

SEQ ID NO: 1344 - DNA, 551 bp, Homo sapiens
ctgaagcaacttgggattaattgcttgattagcttcacgaagcacagagataaggtcgctcacttgctttatgttattaggtgtaaagaaagtgtatgctgtgcctgttttggtactgcgagcagttcttccaattcgatgaatataatcctctgaggagttagggtagtcataattgatgacaaatttcacatcttccacatctagccctctggaggccacatctgtagcaatcagaataggagcttttccatgtttgaattcatttagaacccagtcacgctcttgttgactcttgtcaccatggatacccatggcaggccacccatctctcctcatttttctggtaagctcatcacatcttcttttggtttccacaaaaacaatggttttattctccttctcactcatgatctcttccattagacgaataagtttttcatccttttctacgtcatgacacacatccacaatctgaagaatgttgtggtttgcactcagttcaagtgcaccaatgtttatatgaatatagtctttcaggaaatcttcag

SEQ ID NO: 1345 - DNA, 213 bp, Homo sapiens
ccaggctggtctccaactcctgacctcgtgatccgcccacgtcggcctcccaaagtggtgggattacaggtgtgagccaccgcacccagcttaacatcttcttctttgactaggtaataactctacacagccaggaaagcattcctgatatcaaaacccctcctgaagcacttccagctcattttttctgttctgtcttcagagaaagaaatc

SEQ ID NO: 1346 - DNA, 500 bp, Homo sapiens
ccagagttgactctaggtagtgatgtgattttcttgggatgtttttctaaatattcttttatgctaaagcacatggcttgatacttctgttgattaagctcgtgtctacttacagtcatctagtgagaacctgtggtgtggtgagatgataacttggtctttggtcttcatcatttgaactagttttggttttgtcttgtcccttccttgagcattttgtgtgtgtttaatcctatttggtaaacgaaccactgtgaaagaccaagttggagaaaacagaacacccccaaaacatttattttttttttttagaaaatcatggctcactatggtagtatacaatattgttttcacacatgtacacttgaaaccaaatttctaaaacttgtttttcttaaaaaatagttgttgtaacattaaaccataacctaatcagtgtgttcactatgcttccacactagccagtcttctcacacttcttctggtttcaagtctcaagg

SEQ ID NO: 1347 - DNA, 231 bp, Homo sapiens
ccaccacaccgggcaaattattttgtatttcttttttcagagacggggtttcaccatgttgcccaggctggtctcaaactcttgggctcaagcgatccacccacctcggcctcccaaagtgctaggattacagatgtgagcattgtgcctggcctagatcgcccagactatgtgtggtgaaaaaccactttccttcttcaaaattacaatctttcatggaccaacactttt

SEQ ID NO: 1348 - DNA, 435 bp, Homo sapiens
aaaatcttgagggattgatctcgcctcatgacagcaagttcaatgtttttgccacctgactgaaccacttccaggagtgccttgatcaccagcttaatggtcagatcatctgtttcaatggcttcgtcagtatagttcttctccaggaactcgcgcactgacttggcaccccgacctatggcattggccttccaggcatggtatgtgcccgaggggtcagtctgatagagcctaggagtgccatcaaagtcgaaacccacgatgagggcagagatgccaaacggcctgcgcccattgctccgcgtataacgctgcttcagactggcgatgtagcgggtgatgtactccacagtgaccgggtcctccacagtcagccggtggctctggcactccacccgggccctgttgatgactatccttgcatcggcggtgagg

SEQ ID NO: 1349 - DNA, 463 bp, Homo sapiens
caggtaaatataacaaaatgtgtaatttgtgactctaatattaaataagatatttgaacaagctaggaaaattgaatttctgctgctgcttcaaagaaaaagctgccccagagcattaaacatggggtattgttaagaagcaaaatgttcttgtttgccatcatgtgtttcacaccacaattctgtgccacagttaagagggtctggtacccttgcaggacctttgtaggttgtgggaaaaagtcgcagaaagatactcaaagtggagcagggaatggagacagacatcagtgatgataaaaaaaaaaaaaaatggaccttaagaaactatttactctgtaatctctaataaaatatggaattccatattagggcaatgaggctgaaactactggtgtttttctgccttgagaaaacaaacagttaaaacaagcctcaaatgtattttagtgccacccactgg

SEQ ID NO: 1350 - DNA, 56 bp, Homo sapiens
ccatactgggggaacagttcatggttggggaggagatctgtggggctgtggtgtct

SEQ ID NO: 1351 - DNA, 513 bp, Homo sapiens
  misc_feature 509: n = A,T,C or G
ccagcctttcacatcccatgggaaaccgcccccccgggccttggagaatgggggtccaagtgcctatccccctttggatgtaaaattcatcgttagtaaacatcatccgcccagcaacaagcaaagcacatcgcaagattaaaacaaagaatccgccgtgaacagaaggcagcaaagaaaatgtggagctactgggatcccaggtgcaccaggactctgtgaggacagcacacctgagtgatgatgattaacaccttctggagccagctcatcagctcagagcccagggtcaggagttcgttcagtaacgcagcgggaatcaatctgcactgacaccgcggcaggaactgaagctgccctggcaagtgaggaaccaggagccgtcactgagtgtggctgggctacatcatagctcatcacggagctacgactttgggtactgcggacagacctggataggcccagcattcgttctgaagatcacagttcacagaagcttttgcttcgtnaaga

SEQ ID NO: 1352 - DNA, 555 bp, Homo sapiens
ctgccagcacggctagaataaagcaggcaaaagaaggtggaaagagcagactggctgagtcttctggcctccatctttctctcgtgctggatgttcctgtcctcaaacatcagactccaagttcttcagcttttggactcttggacctacaccagtggtttgccaggggctcttgggcctttagccacagactaaagactacattttttttttcggctttcctacttttcagatgtggggacttggactggattccttcctccttagattgcagacggccaactgtgggacttcatcttgtgattgtgtgagtcaatacttctcaataaactctccttcatatacatatctgtcctattagctctgtccctctagagaacctgactagtacaccactaatgtttttactcatgaggaaatgtaaatgtgaaacagaattcaagaatcaatgctcacaaaaaatgtaagttaataaataatgaagttttagtagaaatattgaatccccattaggaaagaaattattgtaatcttggcaaaactatacaccattaa

SEQ ID NO: 1353 - DNA, 310 bp, Homo sapiens
  misc_feature 223, 224: n = A,T,C or G
ctgcctatttccacatctttcaatccatctggctccttaaataggggaaaaagcccttatttggtggagaagcatttccaaaatgaagttacaggttctattaaaacttactgtcacatcaactgttaaaatagggccttttgtgttttgttatttcaccttaatatcaccagaattcctgtaattccacaattgtgattttactatgtagaagataattcannttctagtctattgctttagatgtaaaaacagccaaccttcccgccagactacggcttccccgaacgcaaggagcgcgagatggtgg

SEQ ID NO: 1354 - DNA, 522 bp, Homo sapiens
ccacagcacagaattttatgtgaggaactcagatttttgaagacttaacaattgcagagaaaggttgcagcctgcacaccatagcccacctctctgagcagactttggttttgtgtggtgacgtggcacatgtttgtacactgggatttttcaaaggacgctacgcgagcagactgacttgcctcttctgtgagcactgtggcttttgtcagatggagtgccggtctgcagaggactgctctttcgaatccacagtgttatctgtgtaaatagctttaatttttcttctgtgtcttaggtgaagttttgttcatgtagcaaccaggtagacagtgaccaaataaggctgtaaatgtgctgtagttttctactgtgatgtacttgaaggagaacctgtgtcctctacttttctgatctcccacaagtattttgtgtttgtttcctgagtcctgaggttattattttactcctgttttgcccccagttttctttgttttttttctggagacccagggaggccca

SEQ ID NO: 1355 - DNA, 213 bp, Homo sapiens
ccagcagttcctctttgccttatatttgtggtacgcccggccagccttcaagatgggtttgtcaattcggccacctccagccaccacaccaaccacagctctgttggctgaggagataaccttcttggagccggagggcagcttcacacgggtcttcttggtctcagggttgtgggagataacggtggcatagttccctgatgcccgggccag

SEQ ID NO: 1356 - DNA, 494 bp, Homo sapiens
  misc_feature 254, 342, 404, 480, 486: n = A,T,C or G
cctaagctctaggacggtgaatctcggggctatttgtggatttgttagaaacagacattcttttggccttttcctggcactggtgttgccggcaggtgggcagaagtgagccaccagtcactgttcagtcattgccaccacagatcttcagcagaatcttccggtaatcccctgaagtatctcccgagatgtcgtggtacagcgacttgccgttttgtacaagctttttttttttttttttttttttttttagnaaatagtttattcatccagcagtttcagccctgatactgaagcctgttgcggggtttcttatttttctggctggagcctgattatganaacatggcctcaccacggggccagcgctcaaattcctgccctgccgatcatccagacatcanaggaaatgagagtattgctcaaatgagggagactggagctttattaaggaaacaaaaaataccagtaagactaganaggggnggttaatg

SEQ ID NO: 1357 - DNA, 403 bp, Homo sapiens
  misc_feature 36, 38, 63, 68, 77, 89, 92, 102, 126, 210, 237, 293, 337: n = A,T,C or G
caagcttttttttttttttttttttttttttttttngnataaatagactttattgaagtcagngcctntgtactganacagaagattgngtntacataagcncaagttgtaacatttcacaacttntaaaaggaatgtcaacaattacaacgatcatgcataccatggtcgataatcacattttaaaagcattttcaaccatttctaaanaaatgcttataacattgttatatatanaactactttcaataaactgcaaaacattgatcgacttttccagtatgagctacagngtcaacacaaaagggaggcataaatgtttaatttatgaaatcanaatggaatatttactgtaaagaaaaattaaaaagctttcaaataaaggccattatcgaaccaacgt

SEQ ID NO: 1358 - DNA, 617 bp, Homo sapiens
  misc_feature 578: n = A,T,C or G
ctgaaaatctgaaattaaaagcatgctagaaatcctaaatgcaatcttttggaagtctgctattaaaaagcctttaaggatttactaacttcgagtctaagtgcaaggggacgaaagcttaagcctgtcagacattccttttcttggacaaaaagatcaaagtttcctacaaattgctaagctttgcacaagggagaagcctacatgtactagtgcatggaatcagtttcatcttatttcatggggactcttctcccactggaaagaaacagaatgaggaatgaatcttaattggtctcttcatcagaagtggtaaacttggtctctatattcacgaagtcagacagttttttaagcagactgtggaagcagacagaaccagcttcctgtagccacagaccactacatggtatctaagctaaagcaaagatgaacaattatccagattcacttgaactgtactaaagggcaaggttcaccactacaaaagggaagttgtctaaaagcaagaattcaattaacgctgggtaagaaaagtcaaaacactaatgagttgtccatgaagccaactgctaagnacgcgctcaactatacgcgacatgaagacactatgcacg

SEQ ID NO: 1359 - DNA, 483 bp, Homo sapiens
aaaattaaaaaacgaaagaaaaaatagctgggtgtggtggctcacacctgtaatcctagcactttgggaggccaaggcgggtggattgcctgagctcaggagtttgagaccaacctgggcaacatggttgaaaccctgtctctactaaaacataaaaaaaatcagccaggtgtggtagcgtgcacctgtagtcccagttacttgggaggctgaggcacaagaattgcttgaacctgggaggtagaggttgcagagatcatgccactgcactcccagcctgggtgacagagcaagactgtctcaaaaacaacaacaacaacaacaacaacaacaaaacaaaacaaaaaaaacctctcaaaaaaatgaaaaaaaatttaaattaaaaaaaaaaatgctgggtctgatggctcacacctgtcatctcagcactttgggaagctgaggcaggcagatcacaaggtcaggagatagagaccatcctgg

SEQ ID NO: 1360 - DNA, 528 bp, Homo sapiens
  misc_feature 526: n = A,T,C or G
gctggagcccaccaagctgtcactgctgcactcactctgcaagggatcaggaccagcaacctttatattctagattctaagacattgtacagagaaattcagaagtgtaaaaatattgcacattgacaaataccaagaatttttgcgtatgtttatattgtattgttctaaataatgggtagcctgtgaaataagatcttgccacccatgtaataatagtagtaatactatagttaaaatggctgtaagaatagttttataaaagtgaatacacagatctattgtatttgaaacataactttgacaattattagtgtgaccaaagtattaggcggttttcatacatttttcaccttgtacaaaattatgaattcatttttcctccaggccgacaaggagttgtagaatgaaaatgccctctaagtgttattttggttgttctaacttacaaaagtgattttgaataagaaatatttggtgttctttttataaccagtttttgattggtaattgttttctgtattgntt

SEQ ID NO: 1361 - DNA, 490 bp, Homo sapiens
ggagcagtcccagccttgtgcagacaatgctgtgctttccagtggtctcacggcagcacgatgaagactggaaagcgacgggtctgttgcggttctcccacttttccataagcagaacaagaaccaaatcaaacgtcttaacgcgtatagagagatcacgttccgtgagcagacacaaaacggtggcaggtttggcgagcacgaactagaccaagcgaagggcagcccaccaccgtatatcaaacctcacttccgaatgtaaaaggctcacttgcctttggcttcctgttgacttcttcccgacccagaaagcatggggaatgtgaagggtatgcagaatgttgttggttactgttgctccccgagcccctcaactcgtcccgtggccgcctgtttttccagcaaaccacgctaactagctgaccacagactccacagtggggggacgggcgcagtatgtggcatggcggcagttacatattattatttt

SEQ ID NO: 1362 - DNA, 221 bp, Homo sapiens
ccaacatagaacttggataggaaatcctttggccttggcgcttctgtttcatggaagaaccgcataacatgtgtccgctgcttccatactttaattgtttcttccagttcgatctttcccttaatgaccagaagatcaaccaccctggggtctgtgacatgggcattcttcataaacatttctcggactttatcccgtcccattttcacagtgatgtccag

SEQ ID NO: 1363 - DNA, 482 bp, Homo sapiens
aaattctctggatgagcaagaaggggttaaaagtggaatgtatgttgtaatagaagttaaagttgcaactcaagaaggaaaagaaataacctgtcgaagttatctgatgacaaattacgaaagtgctcccccatccccacagtataaaaagattatttgcatgggtgcaaaagaaaatggtttgccgctggagtatcaagagaagttaaaagcaatagaaccaaatgactatacaggaaaggtctcagaagaaattgaagacatcatcaaaaagggggaaacacaaactctttagaacataacagaatatatctaagggtattctatgtgctaatataaaatatttttaacacttgagaacagggatctgggggatctccacgtttgatccgttttcagcagtgctctgaaggagtatcttacttgggtgattccttgtttttagactataaaaagaaactgggataggagttagacaattt

SEQ ID NO: 1364 - DNA, 442 bp, Homo sapiens
ccttgggcccagatgagccagtacagactccagacagaggggcccttggggccctccaacctcaggtgatgagctgagaaagatgttcacgtctaagcgtccagtgtgcacccagcgctccatagacgcctttgtgaactgaaaagagactggcagagtcccgagaagatggggccctggctttccagggagtgcagcaagcagccggcctgcagacccagcctgaccaacgatgagcatttcttaggctcagctcttgatacggaaacgagtgtcttcactccagccagcatcatggtcttcggtgcttcccgggcccggggtctgtcgggagggaagagaactgggcctgacctacctgaactgactggccctccgaggtgggtctgggacatcctagaggccctacatttgtccttggataggggaccgggggggcttg

SEQ ID NO: 1365 - DNA, 414 bp, Homo sapiens
aaagttgctttgctggaagtttttataaggaatctcaaattaaacttttagaagtttaattgacactaggaagccaaaccaaggctgacttcagactttgtttgtagtacctgtgggtttattacctatgggtttatatcctcaaatacgacattctagtcaaagtcttggtaatataaccaatgttttcaaatgtattctgttatacaaagagcagatttttattgaacttgtgcaataactatattcccatacaatataaatattcatgaatagtttcccaagtctggagcgaccacatagggagaaaatgtaaatgtctcaatttttgttcacaaaagtatattttatcaaattgctgtaagctgtggatagcttaaaagaaaaaaagtttcctgaaatctgggaaacaag

SEQ ID NO: 1366 - DNA, 502 bp, Homo sapiens
ccagtttgttctaggatgcattgcatcagacatcacagtacatgaagaaaatctgctttttgtgaaaagccaccaggcattttagatcccgtttaccatgaagtgcagacacagcagatacccagataatacagtcagtgcaaaagtcaaatgagtaagtcagctctttgatgaggctggctacactgcaaaatataaatgaaactcgaaaatagaaggtaaggtctatttacaaaagtttgtttagtaaagtgacttgaaaaaagttgttaaccacttcccaggcatccctcccctctcccaccaaaacaaacaaacaaaaaacaacaacaacaaaaaccctgaaaattatcttgaaagtcaagttaaaactatgtggtgaaaaagagagtgcttgttccaggtaaaggacttcaagataatttacaggcagatttatttttattagtaaaagtcacaaataggaaaagacttattggctgactttgagctgtgtgctttt

SEQ ID NO: 1367 - DNA, 411 bp, Homo sapiens
ctgtcagggattcacagttgagcttttgggcacctgctgagtgggctctatcaggttggtggcactgggccatctgggggagtgaatgacctcagagcttcttcccaggaatttggatttattttagaagagaaagctgctttgcctgtcccttctcctcctctgcttctccttttaacaccaactgtatttagatgaagactgccccccaccaccgtccccgttccatctgtctttcttacaccagtaatcctgtaaatgtgtatttttctccctttcatgtgttgattcaacccttgaggttggtgggacattgcattagactcacggcttcttaatagtactggactttggtttctgttttgtgttccatacggagaggtctcttcctttctgagtttccgcatgcag

SEQ ID NO: 1368 - DNA, 255 bp, Homo sapiens
gacacactaacatttataccaaattgcagattattctgcagagagggaattgcatgtttgtgttgtatatttagtatgaacttttttcagaatataatatttcttagttatcaaaagtagttggaaaacatttgcaagactatgaacatagaattgctgcttttatattttaactgcagattgtgaatttcactgccttatattatttatttctgaaacaaaagaggcatttttcaataaaactactgaaaattt

SEQ ID NO: 1369 - DNA, 63 bp, Homo sapiens
ccttcgagaagatccctagtgagactttgaaccgtatcctgggcgacccagaagccctgagag

SEQ ID NO: 1370 - DNA, 402 bp, Homo sapiens
ctgtttaaaatgactgtctgactcaccatggtaatttttcacaaattaaagacacattttgggttgtgcaacagtgtcctcatctttccaggcaggcagattattttaatgctgttatacagggaattgggactctcggattttcttttttaacctttttatgcctttcagtaggggaagtttccttgaaagagagctgcaaatctcttaagtatcaacgtaaagaagccgatgacccaattcgggaggtggttcaagtgttctgttcgtttacaaaagcacagaccacgaccatggacacacccagtggaagtaaccacacctggtgtgttcctagaagctcacctgtgacagttcaacaagaacttactattccagaaaagtattacacaaagttatttt

SEQ ID NO: 1371 - DNA, 456 bp, Homo sapiens
aaaaaagcacctccttaccccatatcacgtttctctgacaggtgttaaagtaggcaatgagtatgtcaacagcttgagcatcagcgtcttgcaaggacttcagaccaaccactcgccaaaaatcttggcagcttttttatcttgtttttaatacaacggtacatccactctgatggcaaacctgtccagccacatctccacaacaagctttgcaaaatcagtgattagcaaattagttagctttggcacggagctgtgctcgcttgcccgtgacagcctggaagccggttttgatactggcaacagaacatctagaatgacaagtttcgcactgtaggaaatagagtcgtgtgtccttctgcaggattgtgtccggtgatcggcatgtgtgacaagtgacatattccttgatatatcttctcaagacattttctatctgtttctgttggaatcttc

SEQ ID NO: 1372 - DNA, 327 bp, Homo sapiens
aaaggagactggatatggagtgaagacacagtctattaatgtactgagtggagtatgggtagcctatgaaaatcctgacttcacaggagaacagtatatactggataaaggattttataccagttttgaggactggggaggcaaaaattgtaagatctcttctgttcaacctatatgtttggattctttcactggcccaaggagacgaaatcagattcacttgttttcagaaccacagtttcaaggtcacagtcaaagttttgaagaaacaacaagtcaaattgatgattcattttctaccaagtcttgcagagtttcaggaggcag

SEQ ID NO: 1373 - DNA, 483 bp, Homo sapiens
ccattaaaagttatttacaacagtgggagaaaaaaagacaagaagttgtttcacattacagacctccccccaccccaaagcctaatacttgcttaccaagtcaaaaaagagacacagttgattcacaggctggaggtttgaacttgagtaagacatttataaaaacctagacggggcagtgtcctccccagcccaggtgccactaggcacagcacaagagactaaaaacaacaggggaaggctggacactcaaggtttgggagtataagcaccccacttctggctcagggatttggggagtagggtaaacaaaacctacttggaaaagaattggggaagaaaaccaacaactgccttatgcaggggtggggacagggaaggaggtagggccagggacaggagcatttcacatcactaacctaacttgggaagctgtaagggaccatcttcaactggccttaagaggagaaccagatggctgat

SEQ ID NO: 1374 - DNA, 270 bp, Homo sapiens
ccagagggaagtggatgcggggatagggcaccaggttggtctggaattctgtcaggtcaacattcagggctccatcaaatctcagggaagcagtgatggaggacacaatttgacctattaacctattcaggttagtataggttggacgctcaatatcgaggtttctacgacagatgtcatagatggcctcattgtctaccatgaaggcacaatcagagtgctccagggtggtgtgggtggtgaggatggagttgtagggctcaactacag

SEQ ID NO: 1375 - DNA, 558 bp, Homo sapiens
ccaacagagcaagaccgtgtctcaagaaaagaaaaaaaaaagttcaaattctttagaaaacagcataatttgtagcccgtgtgatgccaataggaattgtcaaggaagtgcccgtccaagtcatggaagatgatgttatggtacaggtgtgagagcaaccactgaaggagattctgggaaggccaaaggggagggcgggctgaggggtgtccattttaagggttaacttgccggaaacctcaggccgactttccagagcagagggcctagctttctgcccttccccctgcaggagccaatttagtcaaaagaaagcaaactctggattggggggtgcaaaaggagacgctggctggcaaagacctggcacactcatgcctaccagctttttacgtggctctaaacttcctgagcccacccagaattccaactgggtgagtcctagcagcctcttagcacacagcaagagtcccccactcgctaatgggaccgagcccaaagcagatcccctttagatgtggagtgggtcctatccctccagcccctcggaatcatgat

SEQ ID NO: 1376 - DNA, 456 bp, Homo sapiens
ctgctcattgcccccttcaaagaggaggacgagtgggacagcccgcacatcgtcaggtactacgatgtcatgtctgatgaggaaatcgagaggatcaaggagatcgcaaaacctaaacttgcacgagccaccgttcgtgatcccaagacaggagtcctcactgtcgccagctaccgggtttccaaaagctcctggctagaggaagatgatgaccctgttgtggcccgagtaaatcgtcggatgcagcatatcacagggttaacagtaaagactgcagaattgttacaggttgcaaattatggagtgggaggacagtatgaaccgcacttcgacttctctaggaatgatgagcgagatactttcaagcatttagggacggggaatcgtgtggctactttcttaaactacatgagtgatgtagaagctggtggtgccaccgtcttccctgatctgggg

SEQ ID NO: 1377 - DNA, 397 bp, Homo sapiens
ctgttaaagattccccaaagcatctgagacaccatctggggtgcagcacaacagaagacgtttaagatgggaccagaaagaagaatgtatagctcttctctaaataaacgaatggtctgccccaagccttcaggaaggagaatggtctatggtgactggggaaagttctctttgccctcccagcactctgatgtcagagtagtaggttaagggtggaaggttgacctacttggatcttggcatgcacccacctaacccactttctcaagaacaagaacctagaatgaatatccaagcacctcgagctatgcaacctctgttcttgtatttcttatgatctctgatgggttcttctcgaaaatgccaagtggaagactttgtggcatgctccagattt

SEQ ID NO: 1378 - DNA, 333 bp, Homo sapiens
cctacagacttatttcttcttggacacacccacggtgcggccacggcggccagtggtcttggtgtgctggcctcggacacgaaggccccagaagtgacgcagccctctatgggcccgaatcttcttcagtcgctccaggtcttcacggagcttgttgtccagaccattggctaggacctggctgtattttccatcctttacatccttctgtctgttcaagaaccagtctgggatcttgtactggcgtggattctgcataatggtgatcacacgttccacctcatcctcagtgagttctcccgccctcttggtgaggtcaatgtctgctttcct

SEQ ID NO: 1379 - DNA, 463 bp, Homo sapiens
  misc_feature 31, 43, 53, 60, 73, 123, 139, 144, 152, 169, 246, 311, 316,334, 337, 354, 373, 418: n = A,T,C or G
ttttttttttttttttttttttttttttttnaaagcaaatttnttttaatganaactcanaattaaacttcanagggacccaacgtcatacttccattcagggacttgatacaaaaaatttantttgaactgctattancaggnggcagganccaccttcaaatgaatnttcaaattggaaaatactgcttcaccacctgttggggataagttgcaaatggaataatttagtatggtttgtagctnttttgatgaccacctcgcctggataccttcccataaccactctgctggtcaccaccttttccacnagctnttcctgcaaatcctcctntanatccccactgttgctgntgctgatattgttccttcnacatggctacttttatttcacatttactaaaaccaacattggggnatttcttttccattatcttcttcactggttcttcttccttaaagg

SEQ ID NO: 1380 - DNA, 199 bp, Homo sapiens
cctgtgccgggccccagggctggcagccaccagctcctcttccaggcatgggggacaccctgacaggatccggaagtctccatttacccaaaaatgcaagagccatgatcagtcatggcgacactgcaggcggtactgagtgaccatgtccagtccggctccgtccctcccacacgggggacaagcttctccgaggagg

SEQ ID NO: 1381 - DNA, 216 bp, Homo sapiens
aaagtagagataatttactgaagcgtctctgacaatctaacttattagacagcaagcaatatataatactgaaaaagtattcagaaatggaaaatttacatcatataggttatttaacttgtgttcagcctttttgtaacttttttgaaagtgcaaacaattctttggattattaaataaggtatacagtatgcatggtttctcaaatttagcttt

SEQ ID NO: 1382 - DNA, 466 bp, Homo sapiens
ctggaggccgaggagcaggggaagcagaagaagcggcagagtgtgtcgggcctgcacagataccttcacttgctggatggaaatgaaaattacccgtgtcttgtggatgcagacggtgatgtgatttccttcccaccaataaccaacagtgagaagacaaaggttaagaaaacgacttctgatttgtttttggaagtaacaagtgccaccagtctgcagatttgcaaggatgtcatggatgccctcattctgaaaatggcagaaatgaaaaagtacactttagaaaataaagaggaaggatcactctcagatactgaagccgatgcagtctctggacaacttccagatcccacaacgaatcccagtgctggaaaggacgggccctcccttctggtggtggagcaggtccgggtggtggatctggaagggagcctgaaggtggtgtacccgtccaaggccgacctgg

SEQ ID NO: 1383 - DNA, 92 bp, Homo sapiens
aaaaaagtgacatttgctttattactattggcaggtggggcctgcatgaggtggttagtgtgctcaggggatgggtgggctgtggagatgat

SEQ ID NO: 1384 - DNA, 150 bp, Homo sapiens
ctgtcctgagctaacactaaaagtcactgggtatttggttaaaggtctcccacaagactggtattctctttgcctgaagaaacaaggcattgaatctctaaaatgctgttctcaatcattgtcagagatgttttcagttgcagtcagaag

SEQ ID NO: 1385 - DNA, 465 bp, Homo sapiens
ctgttttcctcaaaatctctggattctccaatatgggatagcgggtctttaagtcgatgaggaagccctcaaatggtctgtaaggattgtggacaataaggtggaaattaagttgctgtataagaagtagttcatattccagtatctgttcaagtgccttctcctgtccaagaggactctcccggaggtttccaacaaactgaggactagatacattgaattcatctactttgcaggccaaaaatgcacaagtgagcattattatcctggggtgatattccattactgagttattaagataaaaacgtttgaaatacatacaagccgtacccacaacagatcttggcattgctggcttaaacaccgaacagaattccaataaccttttctcatagtatttgcagagtgtcatttcttcatgaggctcaagaaagactggatcattcggaagaaccttcccgttgg

SEQ ID NO: 1386 - DNA, 502 bp, Homo sapiens; identical to SEQ ID NO: 1366

SEQ ID NO: 1387 - DNA, 534 bp, Homo sapiens
ctggacagatccccttcccacctgccagcactcaagagccactacaccttggaggtgctccagccaatttgacgacactgaggatccctgtgtggaaatcattctttggctgtctgaggaatattcatgtcaatcacatccctgtccctgtcactgaagccttggaagtccaggggcctgtcagtctgaatggttgtcctgaccagtaacccaagcctatttcacagcaaggaaattcaccttcaaaagcactgattacccaatgcacctccctccccagctcgagatcattcttcaattaggacacaaaccagacaggtttaatagcgaatctaattttgaattctgaccatggatacccatcactttggcattcagtgctacatgtgtattttatataaaaatcccatttcttgaagataaaaaaattgttattcaaattgttatgcacagaatgtttttggtaatattaatttccactaaaaaattaaatgtcttttaagaaacattcttttccacttgttaaaaaaatta

SEQ ID NO: 1388 - DNA, 475 bp, Homo sapiens
ccactagaggtctgtgtgccattgcccaggcagagtctctgcgttacaaactcctaggagggcttgctgtgcggagggcctgctatggtgtgctgcggttcatcatggagagtggggccaaaggctgcgaggttgtggtgtctgggaaactccgaggacagagggctaaatccatgaagtttgtggatggcctgatgatccacagcggagaccctgttaactactacgttgacactgctgtgcgccacgtgttgctcagacagggtgtgctgggcatcaaggtgaagatcatgctgccctgggacccaactggtaagattggccctaagaagcccctgcctgaccacgtgagcattgtggaacccaaagatgagatactgcccaccacccccatctcagaacagaagggtgggaagccagagccgcctgccatgccccagccagtccccacagcataacagggtctccttggcag

SEQ ID NO: 1389 - DNA, 399 bp, Homo sapiens
cggaaaatagcctttgccatcactgccattaagggtgtgggccgaagatatgctcatgtggtgttgaggaaagcagacattgacctcaccaagagggcgggagaactcactgaggatgaggcggaacgtgtgatcaccattatgcagaatccacgccagtacaagatcccagactggttcttgaacagacagaaggatgtaaaggatggaaaatacagccaggtcctagccaatggtctggacaacaagctccgtgaagacctggagcgactgaagaagattcgggcccatagagggctgcgtcacttctggggccttcgtgtccgaggccagcacaccaagaccactggccgccgtggccgcaccgtgggtgtgtccaagaagaaataagtctgtagg

SEQ ID NO: 1390 - DNA, 372 bp, Homo sapiens
ccactaacagacctgatactttggatccagcactgatgaggccagggagattggatagaaaaattgaatttagcttgcccgatctagagggtcggacccacatatttaagattcacgctcgttcaatgagtgttgaaagagatatcagatttgaactgttagcacgactgtgtccaaatagcactggtgctgagattagaagcgtctgcacagaggctggtatgtttgccatcagagcacggcgaaaaattgctaccgagaaggatttcttggaagctgtaaataaggtcattaagtcttatgccaaattcagtgctactcctcgttacatgacatacaactgaaccctgaaggctttcaagtgaaaacttt

SEQ ID NO: 1391 - DNA, 466 bp, Homo sapiens
ctggtcaccttacgcaagagccaggctgaaacatcccctccatactcagctctttaacttttcttttcctttttcatcgggctctttcctaaaaagctgagctgtaaaatattttacatcgaggtataataaataatcatgtacatgttttaccaccacccaggtcaagacatagaatgtttcaacatttccatcaccccagaaactccccttgtacccccttccacttcgtctcccctagctcctagaagcaaccactgatgtgatttctaccaaatccagttttggtcctactaaatatactcttttgagactggcctcttttactcaccataatgcctttgtaattcatccatgctgttgtgtgtatcagtagtttgttccttttcattgctgagtagtattctattgtagagatgtaccacagtttgtttattcttctgttgatggacgtttgggttgtttc

SEQ ID NO: 1392 - DNA, 156 bp, Homo sapiens
aaagtcgttttgggaactgtgatgtgatgtggaaatactgatgtttccagtaagggaatattggtgagctgcatatataaatttgacagatagctatttacatagccttctaagtaaaggcaatgaattctccatttcctactggaggatttattt

SEQ ID NO: 1393 - DNA, 480 bp, Homo sapiens
  misc_feature 27, 56, 343: n = A,T,C or G
ttttttttttttttttttttgaagcanaaggaactctttattggaaagtggatganagaggcagctccagccgtgggcatcctgaatgggaggaagaatggacagtgtgggaaggggaagggcagcagggacttaggaccagatggggcctgtagctctggggacggcacaggtgcagcaaggaccggctccctctcactggggaacgaaacaggccatcccgcaagagccttcacagcacttcttgattcctgggcagtcagtatctttcaagcagcggttagggggattcaacatggcgcaccggatcaagataatggggcaggagccaggcttagtgganactggacctttgactggctcttgcgctttgactttatctcgacctttaactgaaacttgtcctttaacgggatcttgtccattgaatggaacacggcctttgacagtgtcttgacctttaacaggaactcccgtgac

SEQ ID NO: 1394 - DNA, 487 bp, Homo sapiens
cctctgtcctccctcttctcaaagtcccatgattctgtcaaggtaatattgccaataatcattcacatttcacgtggttttagacacgcaggttattcagacagacacagacaacaaaacaagcctcaaagccagaacaaaacaaaacaaaacaaaatcgaacataggtataaaaggtaaaatatatgtacaaagtacacagtacgtgaggtatacacggcattctcacaatgcatgttagtagtttgcctaggcatagcccttaaagatgactgcctgtttttgtgccatttctcaaaatacagtatattttgtttacccgtttaaccacctgatttcagcactgtccaagacagttactgatatttcatctgaatttgttttttaatgaaagttgcaatttctccattaagctccatcttttgtaggggagtgagtttccatctctggacatatctaacagaggctggattcccacctacaaaag

SEQ ID NO: 1395 - DNA, 256 bp, Homo sapiens
ctgaaaagcaacaacaaaagggtttggttgcaacagccagtgtgggtacctctggggagagaggacctcctctgacaaactggtctggtacccaccatgtgccaggatccaccctggcctctttttacccactgactccccagaacaacccttccaggcttctcttgtcatctttctctgcctgaggggaaactgaagctctgaaatgcgatgtgatctgtaccaggtcacccagctatgctgcaaagtgggttgg

SEQ ID NO: 1396 - DNA, 564 bp, Homo sapiens
  misc_feature 536: n = A,T,C or G
aaagcaaaagagacatcctttaataactgtataaaatccaggcagttccattaaaggggttaagaaaaccaacaacaacaaaaagcgagggactgtctgttgtcactgtcaaaaaggcacttggagttaatgggaccaggattgggggactcttagctgatacagatttcagtacgatttcattaaaaggcttggatgttaagagaggacactcagcggttcctgaagggagacgctgagatggaccgctgagaagcggaacagatgaacacaaaggaatcaaatctttacaaccaaattgcatttaagcgacaacaaaaaaaggcaaaccccaaaacgcaacctaaccaaagcaaaatctaagcaaaatcagacaacgaagcagcgatgcatagctttcctttgagagaacgcataccttgagacgctacgtgccaacctaagttctcaacgacagcttcacagtaggattattgtgataaaaatgactcaagcgatgcaaaaagtttcatctgttcccagaatccgagggaganctgaggtgatcgttagagcatagcgaca

SEQ ID NO: 1397 - DNA, 305 bp, Homo sapiens
  misc_feature 238, 266: n = A,T,C or G
ccttgttgcattcatgattcttttcacaagcacctggatcttttcctaaggataaaaagaggcacaaggagacaaaaggctttggagggaaagaaaatatcttgttgtgaccatgtgctgttctgaaacaagaaggaaaagcatgtgggcattgaatggctgcgatcaaagaccgcatggtgacagcaccctggaaagacgatgtcacttccacgaggacacctgcccgggcggtcgnccgggcaggtctggtaggggcggccganacaccacccctggagtgatggaggaggaggatgtcattg

SEQ ID NO: 1398 - DNA, 304 bp, Homo sapiens
ccaagggagatgttacagcccagatagctcttcagcctgcactgaagttcaatggtggtggtcatatcaatcatagcattttctggacaaacctcagccctaacggtggtggagaacccaaaggggagttgctggaagccatcaaacgtgactttggttcctttgacaagtttaaggagaagctgacggctgcatctgttggtgtccaaggctcaggttggggttggcttggtttcaataaggaacggggacacttacaaattgctgcttgtccaaatcaggatccactgcaaggaacaacagg

SEQ ID NO: 1399 - DNA, 460 bp, Homo sapiens
  misc_feature 449: n = A,T,C or G
aaatgtttgtgtgggtggtctgtgtagttactccccatacaacaaagctgacaaaatttttaatttacacaatgtattctgcattttcaaatgtttatgttgtgtatatagcaaagaaattatcttactgatatgcgttgaccaaatcccatggagaaaagacatctcatttgaggttccccttcctctcatgtgtttgattttttggaaggtgatacagtatgtgggtaaccatgcaaatgtttatgaataactttactgaagtgattccatccgtattctgttctaatacttggagaatgaccttcatatttatatattttatttctttgtttcaactatccagtgataattcaggaaatgtttccttttttttttttttacaaaaactttttatttgtaaaatgtttgtaataatgtaaaggtgaacatgttcaataaaaatcatntattaaaagtt

SEQ ID NO: 1400 - DNA, 469 bp, Homo sapiens
cctggctgggcctccactgttgaggtcatcatggtgcttccgctttattctgattaacttttggttacacacattgaaaaatgacctaagagagttgttttgagtggcgctttttctcattgtacagctcctgctagcagtttactgcaacactgatttctctggaacctctcagtttccagtcatcattagggctgttactagcaaggacctacaagccagcctcaaaatgtgagagggctgccgacagtcttcctgtggttagctgccacagtgcccagggaccatcttccctctcctcctcccccactgccagctcctgttccagccgcatcagttcctcatttgagagatcttcttcatgggactgcagcaactggtccacagcagcctcagcaacctcttcaaaggccacatttctggcaagggtcacaatgtttttttgaagctgtgcaatgttatctgcctg

SEQ ID NO: 1401 - DNA, 372 bp, Homo sapiens
ctgggaagtctgtgcccccatccttctgccaggctatctggggggctgggtgccccacagcagcacactccaagcgtgccatggccccagctcggatggtgagatccatgggggtcttggtgaatgagggaagcatatttactgtaagcttggctttgacagagtaggatgaaccaaagtgattggagatgacacactgatatttcccctcactggcaaattccacctcgcgcagccgaaggatggtggtatactccatcacctcgccaccttgggcccggaggtgtgcataattttccatttcagcatcatgcagtagttcattgtcttttttccaagcaaaagtcattggggaatcactgctgctggcag

SEQ ID NO: 1402 - DNA, 542 bp, Homo sapiens
gaacaattgtctctggacggcagctatgcgactcaccgtgctgtgtgctgtgtgcctgctgcctggcagcctggccctgccgctgcctcaggaggcgggaggcatgagtgagctacagtgggaacaggctcaggactatctcaagagattttatctctatgactcagaaacaaaaaatgccaacagtttagaagccaaactcaaggagatgcaaaaattctttggcctacctataactggaatgttaaactcccgcgtcatagaaataatgcagaagcccagatgtggagtgccagatgttgcagaatactcactatttccaaatagcccaaaatggacttccaaagtggtcacctacaggatcgtatcatatactcgagacttaccgcatattacagtggatcgattagtgtcaaaggctttaaacatgtggggcaaagagatccccctgcatttcaggaaagttgtatggggaactgctgacatcatgattggctttgcgcgaggagctcatggggactcctacccatttgatgggccag

SEQ ID NO: 1403 - DNA, 496 bp, Homo sapiens
ccttatttctcttgtcctttcgtacaaggaggaatttgaagtagatagaaaccgacctggattactccggtctgaactcagatcacgtaggactttaatcgttgaacaaacgaacctttaatagcggctgcaccatcgggatgtcctgatccaacatcgaggtcgtaaaccctattgttgatatggactctagaataggattgcgctgttatccctagggtaacttgttccgttggtcaagttattggatcaattgagtatagtagttcgctttgactggtgaagtcttagcatgtactgctcggaggttgggttctgctccgaggtcgccccaaccgaaatttttaatgcaggtttggtagtttaggacctgtgggtttgttaggtactgtttgcattaataaattaaagctccatagggtcttctcgtcttgctgtgtcatgcccgcctcttcacgggcaggtcaatttcactggttaaaagtaagagacagac

SEQ ID NO: 1404 - DNA, 479 bp, Homo sapiens
ctggtctttaattatgtggttccgaagcaaattccttgtatgggcatcaattggaggggttccatctttgaatacagaattcaggggagccaggagggtcaaccgctcacttccagagagatgattgccgaggccggcttgtctgaaaaggtcaatggctgtggacacatcagactctgcagccaattcaaatagtgtcttggctgagtctgggatgagtagctcatcaatgtagtggatcaccccgttggtggctaggatgtctttattggagatgatcgccttcccgttgatagtgagcatgtccccgctgcagcccacctccagtgtcgtgccctccagggtctctacagacagccccgcaacgatggcttcagcacacatagctgacttcaagatgtggttgttcagcaggtctctcagggcttctgggtcgcccaggatacggttcaaagtctcactagggatcttctcgaagg

SEQ ID NO: 1405 - DNA, 362 bp, Homo sapiens
aaatggagcttcctcgaaccttttaattgaagcctagcttcaatgttgaatgaggaagcaaagtatctcattaaaaagttggtctgcaaagcacaaagctggcctgcaaggggacttgaaggaagcaggctgagtgtttgagtagtgagatctttgctttgctctttagatccttcagtaagctaaggtccttttacctgaatggatgtaatttagcctagttttcccataaaataatgtaatggataattcttattgactagggattacacttcatgtgaaattcctcagtgacattcagattaattccagtgtccacaatttaagcaactttccataggaaattaaaatcccaaatccaa

SEQ ID NO: 1406 - DNA, 292 bp, Homo sapiens
ctgccagtggtgagacatggccttcaggagctcaggtggctttttaactgcaccatgaagattccaaacttggtggagttcagtgtccacacataacgaatgagaataggtgtcagcagtgtcaaccaggtccgcaaaggggagaataaaaaagctagggtgccgtatgttgcataaagaaagtagcaggaataaacctgccagatgtacagcagtagcataagtaggtgaacaggcataattttcaagtattttctttgatggagatgagacctgaagttgtgaccaaagc

SEQ ID NO: 1407 - DNA, 181 bp, Homo sapiens
ctgacattcgcgttttacgggggcaccagctctctatcacatgtttggtcgtcacccccgatgactcagccatcttctctgctgccaaagactgcagcatcattaagtggagcgtggagagtggacggaagctgcatgtgattcctcgagccaagaagggtgccgagggaaagccccctgg

SEQ ID NO: 1408 - DNA, 380 bp, Homo sapiens
gagcggaggtggtggcggcggaggctttggcagctcgggactgagtgcaagaatcagcatgattcttcagaggctcttcaggttctcctctgtcattcggtcagctgtctcagtccatttgcggaggaacattggtgttacagcagtggcatttaataaggaacttgatcctatacagaaactctttgtggacaagattagagaatacaaatctaagcgacagacatctggaggacctgttgatgctagttcagagtatcagcaagagctggagagggagctttttaagctcaagcaaatgtttggtaatgcagacatgaatacatttcccaccttcaaatttgaagatcccaaatttgaagtcatcgaaaaaccccagg

SEQ ID NO: 1409 - DNA, 508 bp, Homo sapiens
ccagtataatgctatttttaagactatacagtatgtacgtgcacacacacacactgtcatgtgcacagaaacatacaatgtgtattcttatcatcaatggtccaatttaatgaatcacacagattgaaagggttcaagtcttaaagaagttatgagcaccatagctggtgctcagactgtgcatgtatctttggatcaatgagttgttgaaagtctgctgggtgcagtaaagtacagaatacagaacatcaatgtttaatgttaatacggtaggcaaagagacccagtcagtttcctgggttgctttactggacggctgatgaactaggtactctgttcacttggtaaattctcagaagccagattgactctctatgtatcttgttttatcaggattgtttgcatagcttgctaaaaggcacctaagcagcagcatcatctctatgtcttcagtaaattgtggaacatttctaaaatactcctggaagcagagacagtgtggtccttt

SEQ ID NO: 1410 - DNA, 341 bp, Homo sapiens
aaatgttctattacagcattatgcttcatcaccacctgtttctgaatgatttcactttgattagaagcttggagggtgtgttcacgcctaatttctatctgttgctgtttcttcttttgctgctgatccctgagttgctgaaccctttgcaactgctcttgcacactggctgcctgcactgtaaccacattctgaatctggtgagtctgcacagcactgctttgctgaatttggataggtaactggagtttgatttgctggggcacaccactttgctgagcctgtatctgagccacaacctgtgactggatctgagagagaacctggacttgttgttgcag

SEQ ID NO: 1411 - DNA, 566 bp, Homo sapiens
ccaggttttagatattaacctggctgcagagccaaaagtgaaccgaggaaaagcaggtgtgaaacgatctgcagcggagatgtacggctcctcttttgacttggactatgactttcaacgggactattatgataggatgtacagttacccagcacgtgtacctcctcctcctcctattgctcgggctgtagtgccctcgaaacgtcaacgtgtatcaggaaacacttcacgaaggggcaaaagtggcttcaattctaagagtggacagcggggatcttccaagtctggaaagttgaaaggagatgaccttcaggccattaagaaggagctgacccagataaaacaaaaagtggattctctcctggaaaacctggaaaaaattgaaaaggaacagagcaaacaagcagtagagatgaagaatgataagtcagaagaggagcagagcagcagctccgtgaagaaagatgagactaatgtgaagatggagtctgaggggggtgcagatgactctgctgaggagggggacctactggatgatgatgataatgaagatcggggggatgacc

SEQ ID NO: 1412 - DNA, 199 bp, Homo sapiens
ctgggcccgcttagcccaccaggcatgaggccaagggctccactgaccaggaggccgaggtctctaactcttatcttccacagggtccaagagttcatcaggacccccaagagtgagtgagggggcaaggctctggcacaaaacctcctcctcccaggcactcatttatattgctctgaaagagctttccaaagtattt

SEQ ID NO: 1413 - DNA, 444 bp, Homo sapiens
ccatgaattttaattgaatttttgacggggcaagctacgttacattatggcagaaaaaaagtgcaactgacatactacaaagagattttttaagtttaaaaaaagtttggatcttttggatttcttttttttttttggtctttatgtgcttaaataacgctgaattataattagccacacaaataatgagagttttatttttttttctggctcactccaaatcagcctgttaaggtatatttccttctacagcctttcctgattttgcatgttctcattcccaaagtagtctaccttagtttacactcaaaggtagcacttgttgaaactacatgacagaaacaggctgcaaaggtggacaaggggaagcatgtccctcttgtcttgataaatcagtgccacacacagaacccacattttctgagacattatcttcattataga

SEQ ID NO: 1414 - DNA, 198 bp, Homo sapiens
ccagtatgtccccaggattatgtttgttgacccatctctgacagttagagccgatatcactggaagatattcaaaccgtctctatgcttacgaacctgcagatacagctctgttgcttgacaacatgaagaaagctctcaagttgctgaagactgaattgtaaagaaaaaaaatctccaagcccttctgtctgtcagg

SEQ ID NO: 1415 - DNA, 584 bp, Homo sapiens
ctgtttcctcagagggaaaaatcttgagaccagatggtggagctctggagtcagaggaaatgggtgtcttcagcacaaagctgctgcttttacttcagccacttctgacatttttacataccgagcctgagattatgtgattatctcaaatcaaatcactttgatggagataaataatcaaaactgttttatagtcattgatttggtgagaacagtaatggaaaatggtgttgaaggacttctcatttttggagctttccttccagagtcctggctgattggtgttcgctgttcatctgagcccccaaaagcattattactgatacttgcacacagtcaaaagcgcagactggatggatggtcttttataaggcatttaagggtacactactgtgtttcactgaccatacatttttcttagcccctcaagtaatatagcacagagttatgaatgacaattcccctaaccattcctcttcatatctgcctcttccccttaccatcgtaattctccaaactggtcataaaggcactctgtgaagatattggggactgacatcttaagctctcacctggctgcagta

SEQ ID NO: 1416 - DNA, 525 bp, Homo sapiens
gtagtttcttcatttcaggaagactgacagttgttttgcttcttccttaaagcatttgcaacagctacagtctaaaattgcttctttaccaaggatatttacagaaaagactctgaccagagatcgagaccatcctagccaacatcgtgaaaccccatctctactaaaaatacaaaaatgagctgggcttggtggcgcgcacctgtagtcccagttactcgggaggctgaggcaggagaatcgcttgaacccgggaggtggagattgcagtgagcccagatcgcaccactgcactccagtctggcaacagagcaagactccatctcaaaaagaaaagaaaagaagactctgacctgtactcttgaatacaagtttctgataccactgcactgtctgagaatttccaaaactttaatgaactaactgacagcttcatgaaactgtccaccaagatcaagcagagaaaataattaatttcatgggactaaatgaactaatgaggataatattttcataattttttat

SEQ ID NO: 1417 - DNA, 505 bp, Homo sapiens
gttgaaagtttgacaagtgaatgaagttcacatctggaaatcgttgaacatttttcgttcatggaactcaatggctacgttagtcgtttatgcttttcactgttgtggtaggggctttggaagtaaatgccatcaacaatggatacagaagacctggatttggaataagggcaaaatttatttgatggggctgaattgctctgccaggagcatttggtgtgagatgaaatggcctctcttgagactgagctgccaacctggcaattattgtctgctaagggttctctttattcacccttacttggacttcctttcctgtagggaatctcacgtaaaatgaaatcttccctcccccagggtgtccgcaatgttgccagtgtctgtctgcagattggctacccaactgttgcatcagtaccccattctatcatcaacgggtacaaacgagtcctggccttgtctgtggagacggattacaccttcccacttgctgaaaaggtcaagg

SEQ ID NO: 1418 - DNA, 503 bp, Homo sapiens
  misc_feature 463: n = A,T,C or G
gccgaggaaaaccgcgtactattagccatggtcaaccccaccgtgttcttcgacattgccgtcgacggcgagcccttgggccgcgtctcctttgagctgtttgcagacaaggtcccaaagacagcagaaaattttcgtgctctgagcactggagagaaaggatttggttataagggttcctgctttcacagaattattccagggttcatgtgtcagggtggtgacttcacacgccataatggcactggtggcaagtccatctatggggagaaatttgaagatgagaacttcatcctaaagcatacgggtcctggcatcttgtccatggcaaatgctggacccaacacaaatggttcccagtttttcatctgcactgccaagactgagtggttggatggcaagcatgtggtgtttggcaaagtgaaagaaggcatgaatattgtggaggccatggagcgctttngggtccaggaatggcaagaccagcaagaagatcaccattg

SEQ ID NO: 1419 - DNA, 360 bp, Homo sapiens
aaaaacctgtacacagtgtttattgtggttaggaagcaatttcccaatgtacctataagaaatgtgcatcaagccagcctgaccaacatggtgaaaccccatctgtactaaacataaaaaaattagcctggcatggtggtgtacgcctgtaatcccagtgacttgggaggctgaggcaggagaatcgcttgaacccgggaggcggaggttgcagtgagctaagatcgcgccactgtactccagcctgggcaacagcgagactccatctcaaaaaaaaggaaatgtgtatcaagaacatgattatccaggggtattttctaattcagatcatcaaactgattatatagaagagttggcttt

SEQ ID NO: 1420 - DNA, 270 bp, Homo sapiens
ccaagaagctagggctgctggtcttcccctacacacaccagaactgggaagtgcagtacagtcgtgatgctcctctgcccccccggcaagacctcaacgcccctgacctctatatccccacgatggccttcattacttacgtgctcctggctgggatggcactgggcattcagaaaaggttctccccggaggtgctgggcctgtgtgcaagcacagcgctggtgtgggtggtgatggaggtgctggccctgctcctgggcctctacctgg

SEQ ID NO: 1421 - DNA, 467 bp, Homo sapiens
cctgacattcctgccttcttatattaataagacaaataaaacaaaatagtgttgaagtgttggggcagcgaaaatttttggggggtggtatggagagataatgggcgatgtttctcagggctgcttcaagcgggattaggggcggcgtgggagcctagagtgggagagattaagctgaagggaggtcttgtggtaaggggtgatatcatggggatgttagaagaaacatttgtcgtatagaatgattggtgatggcctggatacggttttggatgatttgagaagctaaatggaagatacaaggtccgaataaaaggaggagaaaaatgggtattaaatgtctaagaattgggaggacctaggacatctgattagagagtgcctaaggagattcagcatagtcctgccagcaaagattatttacttcaagagttaagagtggcagtttggggatagcaccaagagat

SEQ ID NO: 1422 - DNA, 585 bp, Homo sapiens
  misc_feature 487, 555: n = A,T,C or G
ctgccgtcttaaagcagatgtgcgcaacagtgtacaggcacacctgccatagcaaattcctaggatacctcagtcctccatgttggtatgcttttcttttcaacaatgtggaaaatgcagtttaccaagaagcttttttggttttccttttaaggtattacttcaaaaaagcaagcgatgagtttgcctgtggagcggtgtttgaggagatctgggaggatgagacggtgctcccgatgtatgaaggccggattctgggcaaagtggagcggatcgattgagccctggggtctggctttggtgaactgttggagcccgaagctcttgtgaactgtcttggctgtgagcaactgcgacaaaacattttgaaggaaaattaaaccaatgaagaagacaaagtctaaggaagaatcggccagtgggccttcgggagggcggggggaggttgattttcatgattcatgagctgggtactgactgagataangaaagcctgaactatttattaaaaacatgaccactcttggctattgaagatgctatttgagagactgncatacataatatatgacttcctagggatct

SEQ ID NO: 1423 - DNA, 284 bp, Homo sapiens
tgggatcctcaaggtgcctgccatcaatgtcaatgactccgtcaccaagagcaagtttgacaacctctatggctgccgggagtccctcatagatggcatcaagcgggccacagatgtgatgattgccggcaaggtagcggtggtagcaggctatggtgatgtgggcaagggctgtgcccaggccctgcggggtttcggagcccgcgtcatcatcaccgagattgaccccatcaacgcactgcaggctgccatggagggctatgaggtgaccaccatggatgagg

SEQ ID NO: 1424 - DNA, 243 bp, Homo sapiens
ctggatcacttcccgcagtccttgggcagcgctttgctgtggaacacgagagctcctcctcaggggcctggcactcaccttctattctgtatgatgtatttggttaaacactgtcaaataatagagatgtgccagatttagattttcttaccctaatctgtttaatattgtaactttattccatttgaaagtgtcaagcccattcagataagctataatctggtctttaaggaacacaacttt

SEQ ID NO: 1425 - DNA, 132 bp, Homo sapiens
ctaagacctacagctacctgacccccgacctctggaaggagactgtattcaccaagtctccctatcaggagttcactgaccacctcgtcaagacccacaccagagtctccgtgcagcggactcaggctccag

SEQ ID NO: 1426 - DNA, 222 bp, Homo sapiens
cctctttttaccagctccgaggtgattttcatattgaattgcaaattcgaagaagcagcttcaaacctgccggggcttctcccgccttttttcccggcggcgggagaagtagattgaagccagttgattagggtgcttagctgttaactaagtgtttgtgggtttaagtcccattggtctagtaagggcttagcttaattaaagtggctgatttgcgttcag

SEQ ID NO: 1427 - DNA, 270 bp, Homo sapiens
ccagagggaagtggatgcggggatagggcaccaggttggtccggaattctgtcaggtcaacattcagggctccatcaaatctcagggaagcagtgatggaggacacaatttgacctattaacctattcaggttagtataggttggacgctcaatatcgaggtttctacgacagatgtcatagatggcctcattgtctaccatgaaggcacaatcagagtgctccagggtggtgtgggtggtgaggatggagttgtagggctcaactacag

SEQ ID NO: 1428 - DNA, 517 bp, Homo sapiens
ctgcagcctgggactgaccgggaggctctgattatttacccaccacaggtaggttgtgttctgaatctcaggttcacaggttaaggctacagcatcctcatcctccacggggttggagttgttgctggtgatgaagggtttgggtggctcatagactgtgatcgtcgtgactgtggtcctattgaggccagtgtctgagttatgggcttggcacgtataggatccactattattcacagtgatgttggggataaagagctcttgggtggattgctggaaagtcccattgacaaaccaagagtactgtgcaggtgggttagaggctgcgtggcaggagaggttcagattttcccctgatctgtaagatgtgtttagaggggaaatggtgggggcatccgggccatagaggacattcaggatgactgaatcactgcgcctggcactcactgggttctgggtttcacatttgtagcttgctgtgtcatttcttgtgacattgaatagagtgagggtcctg

SEQ ID NO: 1429 - DNA, 240 bp, Homo sapiens; identical to SEQ ID NO: 1249

SEQ ID NO: 1430 - DNA, 65 bp, Homo sapiens
ctggatgagccaaaactagaacgacggcctcgggagagacacccaagctggcgaagtgaagaact

SEQ ID NO: 1431 - DNA, 83 bp, Homo sapiens
gtgctgagagtgcggagtgtgtgctccgggctcggaacacacatttattattaaaaaatccaaaaaaatctaaaaaatctttt

SEQ ID NO: 1432 - DNA, 371 bp, Homo sapiens
ccagcaacatgtccctgatctcagtgaggtcctccttggtgaacacaaagcccacattcccccggatatgaggcagcagtttctccagagctgggttgttttccaggtgccctcggatggccttgcgcatcatggtgttcttgcccatcagcaccacagccttcccgcgaagggacatgcggatctgctgcatctgcttggagcccacattgtctgctcccacaatgaaacatttcggataatcatccaatagttggatgatcttaaggaagtagttggacttccaggtcgccctgtcttccctgggcatcacggcggtgcgtcagggattgccacgcagggtttaaagacgatgtcacttccacgaggac

SEQ ID NO: 1433 - DNA, 315 bp, Homo sapiens
ctctcagctctcggcgcacggcccagcttccttcaaaatgtctactgttcacgaaatcctgtgcaagctcagcttggagggtgatcactctacacccccaagtgcatatgggtctgtcaaagcctatactaactttgatgctgagcgggatgctttgaacattgaaacagccatcaagaccaaaggtgtggatgaggtcaccattgtcaacattttgaccaaccgcagcaatgcacagagacaggatattgccttcgcctaccagagaaggaccaaaaaggaacttgcatcagcactgaagtcagccttatctgg

SEQ ID NO: 1434 - DNA, 466 bp, Homo sapiens
  misc_feature 359, 360: n = A,T,C or G
aaaataaaggataaattctaagtaagtcattaagctaaggaaaaagcagtgatactagtaagccttaatattatactaaggaattgacccacttggagttggacactaattagtgctgagaggtttgtaaattactttaataactcctttctgtttgggggtgtatgctttttccatacctatctttcacatgtttttaacaacatcttctaagtggtaataatgagcatatctcttaccacagagcaaattagttatacttaaggggaagtcacaaccaacacggtagtcatctgactttctattaagaaagatcttctgactgcaacttgaaaacatctctgacaatgattgagaanngcattttagagattcaatgccttgtttcttcaggcaaagagaataccagtcttgtgggagacctttaaccaaatacccagtgacttttagtgttagctcaggacag

SEQ ID NO: 1435 - DNA, 328 bp, Homo sapiens
cccacggactcctggtctgagcccaataaagactgttaattcctcatgcgttgcctgcccttcctccattgttgccctggaatgtacgggacccaggggcagcagcagtccaggtgccacaggcagccctgggacataggaagctgggggcaaggaaagggtcttagtcactgcctcccgaagttgcttgaaagcactcggagaattgtgcaggtgtcatttatctatgaccaataggaagagcaaccagttactatgagtgaaagggagccagaagactgattggagggccctatcttgtgagtggggcatctgttggactttccac

SEQ ID NO: 1436 - DNA, 181 bp, Homo sapiens
  misc_feature 30, 66, 94: n = A,T,C or G
ttttttttttttttttttttttttttttgnaaagcgctgatcctgtttatttggcaggaaaacganacaatccagcagcccaggagggacaggnggacttaatcctcctcctcgtcgtctccagccccagccccaccctggcccttcttggcattcttcctcttcacgcggcccgggcggc

SEQ ID NO: 1437 - DNA, 454 bp, Homo sapiens
  misc_feature 430: n = A,T,C or G
ctggcttcactgctcaggtgattatcctgaaccatccaggccaaataagcgccggctatgcccctgtattggattgccacacggctcacattgcatgcaagtttgctgagctgaaggaaaagattgatcgccgttctggtaaaaagctggaagatggccctaaattcttgaagtctggtgatactgccattgttgatatggttcctggcaagcccatgtgtgttgagagcttctcagactatccacctttgggtcgctttgctgttcgtgatatgagacagacagttgcggtgggtgtcatcaaagcagtggacaagaaggctgctggagctggcaaggtcaccaagtctgcccagaaaactcagaaggctaaatgaatattatccctaatacctgccaccccactcttaatcagtggtggaagaacggnctcagaactgtttgtttcaattgg

SEQ ID NO: 1438 - DNA, 429 bp, Homo sapiens
  misc_feature 386, 388, 418: n = A,T,C or G
aaagaatcagcaaaatttcaaataaaaaattatgaaaatattatcctcattagttcatttagtcccatgaaattaattattttctctgcttgatcttggtggacagtttcatgaagctgtcagttagttcattaaagttttggaaattctcagacagtgcagtggtatcagaaacttgtattcaagagtacaggtcagagtcttcttttcttttctttttgagatggagtcttgctctgttgccagactggagtgcagtggtgcgatctgggctcactgcaatctccacctcccgggttcaagcgattctcctgcctcagcctcccgagtaactgggactacaggtgcgcgccaccaagcccagctcatttttgtatttttagtananatggggtttcacgatgttggctaggatggnctcgatctctg

SEQ ID NO: 1439 - DNA, 447 bp, Homo sapiens
  misc_feature 406, 422, 436: n = A,T,C or G
attccgtcctgcgcggttgttctctggagcagcgttcttttatctccgtccgccttctctcctacctaagtgcgtgccgccacccgatggaagattcgatggacatggacatgagccccctgaggccccagaactatcttttcggttgtgaactaaaggccgacaaagattatcactttaaggtggataatgatgaaaatgagcaccagttatctttaagaacggtcagtttaggggctggtgcaaaggatgagttgcacattgttgaagcagaggcaatgaattacgaaggcagtccaattaaagtaacactggcaactttgaaaatgtctgtacagccaacggtttcccttgggggctttgaaataacaccaccagtggtcttaagggttgaagtgtggttcanggccagtgcatattantggacagcacttantagctgtggag

SEQ ID NO: 1440 - DNA, 420 bp, Homo sapiens
aaatgcattttatttttagacaacctacatgacatgtttttcttaaaaacaatgcctccactccaaataaatcacagtcaaaataaatgaagagctcaagatgacatcagtcccatttgtcttaagtcctggtgttgtgtggatgacaagcagaagccagttatgatgacaggtgatagatccaaaataattgccacatttgttaacatttttccatttctaaaccatccttaaagaaaatcatatatggggtcacaccatcctcacggtagtccaatagagcaaccatgccatctggattcatgttttcaccaataaagaactggtagtttttgaaattagcaaggatgtgcttgatttgttctgcagcccctgtcataaaaggttttactctttctggtctctgttcttcaagtttcc

SEQ ID NO: 1441 - DNA, 286 bp, Homo sapiens
cctcaatcacaactttgtcagcagcagaaccggagggagccgcaatgtacgccacaccactccttttagctctgtctacgttatctcggaaagggaagaaggcatcagagctgatagaaacttcagtcagtttctcaacccattccttcttctctgcctcagtgagtaactcagggacttcctcaaacagtgccttccactttatcaaatcttcatcctcgccaatggttccagtcacatattgatcgatggcattggagatttctgctctcttcactcctgtttt

SEQ ID NO: 1442 - DNA, 103 bp, Homo sapiens
ctggcattttggcagatgcatagagacatctgagaccctcagaaaggaaggataatccaagaatataggaaatctgtgttctcttcctttcattttatccctt

SEQ ID NO: 1443 - DNA, 539 bp, Homo sapiens
ctgcagagagaactcgatgccaccgcaacggtattggcgaaccggcaggatgaaagtgagcagtccagaaagcggcttatcgaacagagccgggagttcaagaagaacactccagaggatttgcgcaagcaggtagcgtcgctgctgaagagtttccaaggagagattgatgcactgagtaaaagaagcaaggaagctgaagcagctttcttgaatgtctacaaaagattgattgacgtcccagatcccgtaccagctttggatctcggacagcaactccagctcaaagtgcagcgcctgcacgatattgaaacagagaaccagaaacttagggaaactctggaagaatacaacaaggaatttgctgaagtgaaaaatcaagaggttacgataaaagcacttaaagagaaaatccgagaatatgaacaggcactgaagaaccaagccgaaaccatagctcttgagaaggaacagaagttacagaatgactttgcagaaaaggagagaaagctgcaggagacacagatgtccaccacctc

SEQ ID NO: 1444 - DNA, 484 bp, Homo sapiens
  misc_feature 479: n = A,T,C or G
ctgctttgttttctgttggcagtggagggacaaggtgagaggagccaggggtagtcatgaacaccagtgggttctgccctgggcagctccccaccttctttaagagagtactgtgtctcagctccagcagtctcaactgggaagacccaggactcctgctcttttctctagtccctgggagacgaggtccagctaaggtagagtaagcagtcagtgaccaggcaggctggtttgggaggtcactgcctggagggcgggatcttgtattcttcggaagatggctgggaaattcttccctccattacgtagaactttcttcccctcctcagttgaggtgcctagatgtcccacaacggggtcttcactcaggtcctccaaaggcacacgctcaaacagtgggtgctcttcgaaatgagtgcacatccagtcgtgtagctccagcacatcggttatggtatacaccagcccccaactcttancacgt

SEQ ID NO: 1445 - DNA, 390 bp, Homo sapiens
  misc_feature 275, 326, 369: n = A,T,C or G
aaaagaatactagcagcttttacctaggctcctaaatgcttgtaaatctgagactgactggacccacccagacccagggcaaagatacatgttaccatatcatctttataaagaattttttttttgtcgtcagtttggcctttcctactgcagccaggtgagagcttaagatgtcagtccccaatatcttcacagagtgcctttatgaccagtttggagaattacgatggtaaggggaagaggcagatatgaagaggaatggttaggggaattgncattcataactctgtgctatattacttgaggggctaagaaaaatgtatggncagtgaaacacagtagtgtacccttaaatgccttataaaagancatccatccagtctgcgcttt

SEQ ID NO: 1446 - DNA, 432 bp, Homo sapiens
cctgagcgaagcccacaaccccgccgggcacatgtgaaagtaaacaaaacctgaaagcaagcaacaaaacatacactttgtcagagaagaaaaaaatgccttaactataaaaagcggagaaatggaaacatatcactcaagggggatgctgtggaaacctggcttattcttctaaagccaccagcaaattgtgcctaagcgaaatattttttttaaggaaaataaaaacattagttacaagattttttttttcttaatgtagatgaaaattagcaaggatgctgcctttggtctctggtttttttaagcttttttgcatatgttttgtaagcaacaaatttttttgtataaaagtcccgtgtctctcgctatttctgctgctgttcctagactgagcattgcatttcttgatcaaccagatgattaaacgtt

SEQ ID NO: 1447 - DNA, 416 bp, Homo sapiens
ggccaaataagcgccggctatgcccctgtattggattgccacacggctcacattgcatgcaagtttgctgagctgaaggaaaagattgatcgccgttctggtaaaaagctggaagatggccctaaattcttgaagtctggtgatgctgccattgttgatatggttcctggcaagcccatgtgtgttgagagcttctcagactatccacctttgggtcgctttgctgttcgtgatatgagacagacagttgcggtgggtgtcatcaaagcagtggacaagaaggctgctggagctggcaaggtcaccaagtctgcccagaaagctcagaaggctaaatgaatattatccctaatacctgccaccccactcttaatcagtggtggaagaacggtctcagaactgtttgtttcaattgg

SEQ ID NO: 1448 - DNA, 429 bp, Homo sapiens
cctgtcagagtggcactggtagaagttccaggaaccctgaactgtaagggttcttcatcagtgccaacaggatgacatgaaatgatgtactcagaagtgtcctggaatggggcccatgagatggttgtctgagagagagcttcttgtcctacattcggcgggtatggtcttggcctatgccttatgggggtggccgttgtgggcggtgtggtccgcctaaaaccatgttcctcaaagatcatttgttgcccaacactgggttgctgaccagaagtgccaggaagctgaataccatttccagtgtcatacccagggtgggtgacgaaaggggtcttttgaactgtggaaggaacatccaagatctctggtccatgaagattggggtgtggaagggttaccagttggggaagctcgtctgtctttttcctt

SEQ ID NO: 1449 - DNA, 324 bp, Homo sapiens
ctgccaaaatctggggaaaataggatcaaagttaggggacagttgtagttctggtgagagacggtgaggtcccgagctcctgggatgagaaaacgaaactggaataggtagacacagtattccttcaagttgtgctttatgaaaaaaaaaaaaatgatgacaaaagaggccagttactttggtaggtctccttttgtgcagccaaacaggtctcatccagttatattttctgctgaagtcttgtttcttttattataattaaataaatgttgtttccaccacaactaagtcaggagcatcatgacatcagttttcccaggtttt

SEQ ID NO: 1450 - DNA, 70 bp, Homo sapiens
ccaccatgccagacctgtaccaccttctggtggagctgaatgctgtacagtcgcttctcgcttgctcggg

SEQ ID NO: 1451 - DNA, 391 bp, Homo sapiens
  misc_feature 310: n = A,T,C or G
ggccctacctccttccctgtccccacccctgcataaggcagttgttggttttcttccccaattcttttccaagtaggttttgtttaccctactccccaaatccctgagccagaagtggggtgcttatactcccaaaccttgagtgtccagccttcccctgttgtttttagtctcttgtgctgtgcctagtggcacctgggctggggaggacactgccccgtctaggtttttataaatgtcttactcaagttcaaacctccagcctgtgaatcaactgtgtctcttttttgacttggtaagcaagtattangctttggggtggggggaggtctgtaatgtgaaacaacttcttgtctttttttctcccactgttgtaaataacttttaatgg

SEQ ID NO: 1452 - DNA, 490 bp, Homo sapiens
aaagcggatctttcctctttgggccatgggtggatttcctgctcaagcaaccttcatctcttaagctgtgttgctggaatctggactttccattcaagctggggcccatcaatcactcggcggctcctctaatgtcttaatcatcctgaaatgcctctgccggccgcattacgtgcctaaatccaaatcatgcctcgactctttccagaaccctctgtcgccatgctagcgtccacagacctgctcccttgaacacctcctctgagattcactgtccacgcactgtgcttttcctggcttggtcggttcctgtgttcacgtacttcctggctttgcagcttggcactggagctgagtctgaaccccagccttaccctgaagtagttacgtagccttgggcaagttactcaacctcttcaagtctgtttcctcaactgtcagctccacatgacatcgaaacgcttcctgcagctcatctgggacggagtgg

SEQ ID NO: 1453 - DNA, 334 bp, Homo sapiens
cgggcgctgaccgtgcccgagctcacccagcagatgtttgatgccaagaacatgatggctgcctgcgacccccgccatggccgctacctgacggttgccgccgtgttcaggggccgcatgtccatgaaggaggtggatgagcaaatgcttaatgtccaaaacaaaaacagcagctattttgttgagtggatccccaacaatgtgaaaacggctgtctgtgacatcccacctcgggggctaaaaatgtccgccaccttcattggcaacagcacggccatccaggagctgttcaagcgcatctccgagcagttcacggccatgttccggcgcaagg

SEQ ID NO: 1454 - DNA, 429 bp, Homo sapiens
  misc_feature 419: n = A,T,C or G
aaaagacactcctcccaaggactaggaagcctctgaaatgggcttggaagtttctaatcccaaagacttcgaacccaggatctggatagcaagcaaaaatatttagatatttactcagttgaaaacgtggggggtggcttcgtggtctcttcgccagccaaatcgcgtggaaaaccacgacctcaatttttacaacagcacgaagacttacaagtgagcgtagcagcgacttcctggaacctcaaacaatgtgggacgctgcaataatgcctgagggcttttgacttacagttgccgccggagacctggggagggggtagtacttgggccggtgagtccaacctcaggaactgtcctttcaaaatggtgatggatgtaacaagttgcatgtctgggctttatttcagtgtattaattgngcgatctttt

SEQ ID NO: 1455 - DNA, 456 bp, Homo sapiens
  misc_feature 260: n = A,T,C or G
cctaaaagatcactatctttcattcagggaaatcagaaactacttctagcagggggagggaggcaggcagggaaagtagaaagggcctgggcagagctgtaatcctcagaacttgtcagccttcagttcccccttgtctgaactgagcactgcccctcagagtcctcccagagccaagacaaaaccaagacagcaggaccaggagtgccactgtctgtcggggttgcctgagggagaaggggaaggaggtggaggtgtangcagcatcactgcagaggcgagatcttcaaggggatcatgatcctagactccatgtgtcgcaccagggggactgtatagtagacattttcatcccagcctctcttcctccaggcagcgtttcgagtctcctcccgagactgcaggtctttataggcccagagatggtgcaccacgtagagctctcctatctgtgag

SEQ ID NO: 1456 - DNA, 466 bp, Homo sapiens
aaatagctgagcacctactggaagaattcctgggctaaatgctgaaaataaaatttaatttctgcacagaaaataccattaacttagtagcctttgcttaaaggtgggattaattctccatgaagtcagaatgagacaataagcagcattaacttcataggcacacagaactagtgctcaaactgctagcacaaattccaacagagtacataaggctaagtcactactcaagtgtccatttccatcaaatttagagactctccctatgcatctaagggaaggaattatcactgaatataaatgcctccaggagaaacggagaattcagttaaggttaaattagacaaaagataataagtgcaagtactagagaaatgttgctggagataaaccataaaatttgtgacactaacgtggcatggggtgaatcacataagctgctagctgttgaacaccagtgtttcaa

SEQ ID NO: 1457 - DNA, 363 bp, Homo sapiens
  misc_feature 292, 303, 308: n = A,T,C or G
ccaggaggcgagaaggtggctgttcccggattgactgctttttcccgggggcctttggaagatttggtggaaggacaagagggcctgtccctgtccccgtccccaggaggtgccgacagtccctgtgctggttagacacggagcgctgcacaccgaaagcccaaattgggagctctgcctgccggcaactttgctgatggggtgattgctgcttctggggggtaaggaaacaagttacagaaattaccgcgttctgtgtgaagggactgaaggtgtggtgtcattggcaganggtcattttangaganctgccccagcccctcgaacgcctggcttggggtgtcattctgcctggcgggcagg

SEQ ID NO: 1458 - DNA, 233 bp, Homo sapiens
aaatcactaaaaatatttattcggatttgaaggatttaagtgctaaaaatcaatccatttcttgcccttcaataattgtccatgcctgccttttgttgtttacatgctcttctgcccagactgttagtaatctagggaccccctttggagctgataagtacagttcagccttttctcctcaaatatataatgactttaacattcctaagaatataggtatttctgaatgattt

SEQ ID NO: 1459 - DNA, 456 bp, Homo sapiens
  misc_feature 435: n = A,T,C or G
tttttttattattgtacaccttgaaggcgaggttaattaaatcctgttgtggagtttgagggccggaatttaatttttggagttttatttaatatcgggagcagattgggtaataaaatgtatattgagaataagacggccttttgaccttttagggtctagggctgtaaagtgtctcagggttgctgccgaacgagccatgaactgggctgggtttttatatttgatgaaaaagagcctaaacgcttctgatttgggataaagaaaaaggagcattaaccttgactatgtctttagctccagccacctttttaagagtaaattgctgggcaggtgggggagggctagtcacagaacgaaactgtaagccagaccgggtgtgaggaggggaggtgataaaaagattatagggtggaggagcggaggctgaggaanaattgggacctagctcggcct

SEQ ID NO: 1460 - DNA, 533 bp, Homo sapiens
ccaaaatattttataacttgtccatacagagttttgatgatggagactattttcctgtgtggggcacatgccttggatttgaagagctttcactgctgattagtggagagtgcttattaattgccacagatactgttgacgtggcaatgccgctgaacttcactggaggtcaattgcacagcagaatgttccagaattttcctactgagttgttgctgtcattagcagtagaacctctgactgccaatttccataagtggagcctctccgtgaagaattttacaatgaatgaaaagttaaagaagtttttcaatgtcttaactacaaatacagatggcaagattgagtttatttcaacaatggaaggatataagtatccagtatatggtgtccagtggcatccagagaaagcaccttatgagtggaagaatttggatggcatttcccatgcacctaatgctgtgaaaaccgcattttatttagcagagttttttgttaatgaagctcggaaaaacaaccatcattttacctgc

SEQ ID NO: 1461 - DNA, 553 bp, Homo sapiens
aaaaacaaggaagaacctaggaaagtccgctttgattatgacttattcctgcatcttgaaggccatccaccagtgaatcacctccgctgtgaaaagctaactttcaacaaccccacagaggactttaggagaaagttgctgaaggcaggaggggaccctaataggagtattcataccagcagcagcagcagcagcagcagtagcagcagcagcagcagcagcagcagcagcagtagcagcagcagcagcagcagcagcagcagcagtagcagcagcagtagcagcagcagcagcagcagtagtaccagtttttcaaagcctcacaaattaatgaaggagcacaaggaaaaaccttctaaagactccagagaacataaaagtgccttcaaagaaccttccagggatcacaacaaatcttccaaagaatcctctaagaaacccaaagaaaataaaccactgaaagaagagaaaatagttcctaagatggccttcaaggaacctaaacccatgtcaaaagagccaaaaccagatagtaacttactcaccatcacca

SEQ ID NO: 1462 - DNA, 375 bp, Homo sapiens
ctgccaaggagaccctgttatgctgtggggactggctggggcatggcaggcggctctggcttcccacccttctgttctgagatgggggtggtgggcagtatctcatctttgggttccacaatgctcacgtggtcaggcaggggcttcttagggccaatcttaccagttgggtcccagggcagcatgatcttcaccttgatgcccagcacaccctgtctgagcaacacgtggcgcacagcagtgtcaacgtagtagttaacagggtctccgctgtggatcatcaggccatccacaaacttcatggatttagccctctgtcctcggagtttcccagacaccacaacctcgcagcctttggccccactctccatgatg

SEQ ID NO: 1463 - DNA, 472 bp, Homo sapiens
cctgacattcctgccttcttatattaataagacaaataaaacaaaatagtgttgaagtgttggggcagcgaaaatttttggggggtggtatggagagataatgggcgatgtttctcagggctgcttcaagcgggattaggggcggcgtgggagcctagagtgggagagattaagctgaagggaggtcttgtggtaaggggtgatatcatggggatgttagaagaaacatttgtcgtatagaatgattggtgatggcctggatacggttttggatgatttgagaagctaaatggaagatacaaggtccgaataaaaggaggagaaaaatgggtattaaatgtctaagaattgggaggacctaggacatctgattagagagtgcctaaggagattcagcatagtcctgccagcaaagattatttacttcaagagttaagagtggcagtttggggatagcaccaggagatatcag

SEQ ID NO: 1464 - DNA, 416 bp, Homo sapiens
  misc_feature 232: n = A,T,C or G
ccacttcctcaggactaagcagcaaaacctaaaggtctgcctgcccagaccacactacacatttgggctcaggcaacgtccctgacactttaacctcattccaaagtcagctcaggtctgcaggaaggcaggcaaaattccctacacctcatttctggatttctgcaccacacagctctcactgtttctgccaatggtgaaaagaccaccaataagctgctgcccttctctnccccaaccattcccaactttcaggccaaagagccgcaggagtttcattctgtcctgtctgtacagatcattattttccagaaaaagtgacccatgaagttggctggggcgggtgtggagtgttatgtcatgggacggaccttgggatgagggcgttaatccatgggcccctctgagatcacttt

SEQ ID NO: 1465 - DNA, 599 bp, Homo sapiens
  misc_feature 499, 548, 590: n = A,T,C or G
ccatggtcttcaccccatgaattctccactctccattttgtgaaagcaccatcctgatcatccttctctgagacagcagtgaaggtcatggcgtgggtcataagtgactcaccaaaagtcagcctctccgctttattcatgttcttcaaggagacaccaaacactaactcatggtcatagagattcatgtcactgaggcccagcttgctattgaagtgttttccaacatcacagccaaaccacacagcctctccatctttgatggaggcagcaaccatctttttcaggaagtcaatgggctggttgttgtatagagtttttctccctccaaccatattgcttaagtattccactgtgtaaagtttgttgtacttgtgctggggcctagggtcattcactaaacaaatcttatcttccatattgaagagtggcttgacatgttccctgtaaaactccaagggtgttatggggcccattttctgataatttttatctttgnctcgatattcccaggtgaatgtctctggtggattacccaaacagatgcncaccactcggaatatctcctccatcatgacgtcctgtgtggncgagaattc

SEQ ID NO: 1466 - DNA, 349 bp, Homo sapiens
cctaaaagcaaactccacagccaaacctttcctcctgtctgtcctacacaccaggaagaatcgaaaaagggaattttcctttacatagctcaagttaaagactttttcatgaaaaagtctagatcatctctctactgtgatttggtacatttctaacgtttatttttattttttaacttaatttttgtggatacatagtaggcgtacatatttctgtggtacatgagatgttttaatacaggtgtgaaacatgtaacaatcacgtcatctaaaatggggtacccatcccctcatgcactgatcttttgtgttatacaagcaatccaattatactcttttagttattttt

SEQ ID NO: 1467 - DNA, 355 bp, Homo sapiens
gctggctcagggaagtgtcttcttgcccacatttctgtggggaaaggtttttaatcctctgatgcttccatcttcctgtttaggccatgtgcccagaaacctggactgatctttctttaatagtgaacccctgggccactgaagagtaacatggctccactggacacaaaagagggatggaatcaacaggcagggggccttttataagccttaggaaaagaaaatgaaactatttcatctttggacttttcaatactattggagtgatttttttctttctaaacagggaaaataatgttacaaaagcatcttttttgttatttgtttgcatccctcccccacaccctggtgtttt

SEQ ID NO: 1468 - DNA, 261 bp, Homo sapiens
cctttactttattcagtgaaagtgtctatttagactaagaggtattttagtttcctgactcgggacatgttgagtaaaggtaatttgccagtcctgggtggggcaaatcctccagcctgatgtgtagggaagggagggggcctgaataatccctgaggagtagtagaatagcagatggaacactgagaagttatttccttgaggatagatttccacgatggaaaggaaatgagaggttctgagaggcgggctagtggcttg

SEQ ID NO: 1469 - DNA, 428 bp, Homo sapiens
cctacagacttatttcttcttggacacacccacggtgcggccacggcggccagtggtcttggtgtgctggcctcggacacgaaggccccagaagtgacgcagccctctatgggcccgaatcttcttcagtcgctccaggtcttcacggagcttgttgtccagaccattggctaggacctggctgtattttccatcctttacatccttctgtctgttcaagaaccagtctgggatcttgtactggcgtagattctgcataatggtgatcacacgttccacctcatcctcagtgagttctcccgccctcttggtgaggtcaatgtctgctttcctcaacaccacatgagcatatcttcggcccacacccttaatggcagtgatggcaaaggctattttccgccgcccatcgatgttggtgttgacctgcc

SEQ ID NO: 1470 - DNA, 325 bp, Homo sapiens
ctgccttatccacccggagcttgtgattcctggcctggcgaagaatggtgttccggcgcatggtctttgcatatgggtttagcttcaacatgattctcaagtttttcagtgggttcttctttaggactctgcgatggatcttcttgcgtggtgctcgaagggctctttggatctctgggcttttcaagattctgctaagatctgtattaatcatcttgtgcatgggaagattgtagttactcttgagggaagcggctttacgccaagtgccgtacaattcatctaacttccggaaagcactttcagtccaaatgcagaaacgtcc

SEQ ID NO: 1471 - DNA, 531 bp, Homo sapiens
  misc_feature 485: n = A,T,C or G
ctgggccaagtaggagagggaagaggtgatatgagcctcctctgtgctctgacagagaaatgtccaattccagatcaaaggcatcattgccaccctctcctctccttcctcaaagaaaactttctggcctggagggaaatagttaagaactgaaaggccaggggctctggaggaaaaaaaccctctactatttccacaaggcagtgaggggtgataagggtgctagtcacagccctgacagcttcagaaagggtacccacattacctctgggttacccagcatccagagccccaagggacctagctctcccggatatatattcctgcaatggactgacctttttacccacttgtctctggtggtgggagagcactctgaaccagaaaccaacaaggaatccacttcccacccaacttaagagtgtatgcacacatgtggatacacatgcacctccccactactcacacagaccccaacccccttnatgtcttttgaggggggctcaaactactggtgcctggggacacaag

SEQ ID NO: 1472 - DNA, 566 bp, Homo sapiens
ccaggttttagatattaacctggctgcagagccaaaagtgaaccgaggaaaagcaggtgtgaaacgatctgcagcggagatgtacggctcctcttttgacttggactatgactttcaacgggactattatgataggatgtacagttacccagcacgtgtacctcctcctcctcctattgctcgggctgtagtgccctcgaaacgtcagcgtgtatcaggaaacacttcacgaaggggcaaaagtggcttcaattctaagagtggacagcggggatcttccaagtctggaaagttgaaaggagatgaccttcaggccattaagaaggagctgacccagataaaacaaaaagtggattctctcctggaaaacctggaaaaaattgaaaaggaacagagcaaacaagcagtagagatgaagaatgataagtcagaagaggagcagagcagcagctccgtgaagaaagatgagactaatgtgaagatggagtctgaggggggtgcagatgactctgctgaggagggggacctactggatgatgatgataatgaagatcggggggatgacc

SEQ ID NO: 1473 - DNA, 357 bp, Homo sapiens
ctgggaacaactttcttcaaactacctggtggtgaacttaacccaggagaagatgaagttgaaggactaaaacgcttaatgacagagatactgggtcgtcaggatggagttttgcaagactgggtcattgacgattgcattggtaactggtggagaccaaattttgaacctcctcagtatccatatattcctgcacatattacaaagcctaaggaacataagaagttgtttctggttcagcttcaagaaaaagccttgtttgcagtccctaaaaattacaagctggtagctgcaccattgtttgaattgtatgacaatgcaccaggatatggacccatcatttctagtctccctcag

SEQ ID NO: 1474 - DNA, 374 bp, Homo sapiens
ccacaaatggcgtggtccatgtcatcaccaatgttctgcagcctccagccaacagacctcaggaaagaggggatgaacttgcagactctgcgcttgagatcttcaaacaagcatcagcgttttccagggcttcccagaggtctgtgcgactagcccctgtctatcaaaagttattagagaggatgaagcattagcttgaagcactacagaaggaatgcaccacggcagctctccgccaatttctctcagatttccacagagactgtttgaatgttttcaaaaccaagtatcacactttaatgtacatgggccgcaccataatgagatgtgagccttgtgcatgtgggggaggagggagaaaagatgtacttttt

SEQ ID NO: 1475 - DNA, 261 bp, Homo sapiens
aaatattgtgaaaacattacagcggaatgaattttcgcagtggttaggtcaaatgcagttacatcatagcaacagtatgttttgcacaatttaaggctttggctggttctttagtcagcttcttcctctgattcttcttcttcagcagtttctaaccaggttagccactgattcacctggaacaaagccttgccttttcccggaaactcttgggttatatcttctttccaagccaagaaagcttcttcttcaataatttcc

SEQ ID NO: 1476 - DNA, 390 bp, Homo sapiens
  misc_feature 280, 328: n = A,T,C or G
ccaccaatggtactgaacctacgagtacaccgactacggcggactaatcttcaactcctacatacttcccccattattcctagaaccaggcgacctgcgactccttgacgttgacaatcgagtagtactcccgattgaagcccccattcgtataataattacatcacaagacgtcttgcactcatgagctgtccccacattaggcttaaaaacagatgcaattcccggacgtctaaaccaaaccactttcaccgctacacgaccgggggtatactacggncaatgctctgaaatctgtggagcaaaccacagtttcatgcccatcgtnctagaattaattcccctaaaaatcaaaaaaaaaaaaaaaaaaaaaaaaaaagctaccttggc

SEQ ID NO: 1477 - DNA, 385 bp, Homo sapiens
aaaaaaccaatagcagccaaaacagaacatttgtaaacaaaaccacaactatcagccctgtgcttaaacacagaatctgcattcttttgaaacattaagtatatgcaataaagagaatatagaccatctttttccttaatatacaatacccaatatctaaaacaatgtcaccaataatagacacaaatcggtgttatcataaggcatgttgaacagtctttttcacagtactcaggggcatcatgttgctgcagaggccacactttccagaagttttctcctcgctgcgatcctcgcacaccgggggcactcggaggactggaagcactgtttgtgaaagcaagccctgcacgctgaacatcttctacatgttgctgtctgaaat

SEQ ID NO: 1478 - DNA, 491 bp, Homo sapiens
  misc_feature 350: n = A,T,C or G
aaaaattaattaaagagaaagagaaaagcaacattttaatgccccaggaattgaaactaacgttttctgtctcggctggacccctacgcccatcttttaaacctatatatggaaaaggaaatttcaatgccagatttgataaaagaatgtgatgtatatgtagctgatgacccactggggaacaccagtgttccagttcacttaccacatctgtgacagtgtgtttagattggaataaatgtgatgcattacttcttatgtttttatcagtgacatggttgactgtgccctaattctcttgagttgcagttaagcaatgaaggttatttcctaatagggaagcaaaaggngattgtcaattgatagtttaatgtttgaccacattagtgtctttatatgaaatagtagaggggaagaaattatagaaaacaaatgtgaaaaaaatacaccagtgggtatctgttctactaaaaccagaagattgttatgag

SEQ ID NO: 1479 - DNA, 454 bp, Homo sapiens
ccaattgaaacaaacagttctgagaccgttcttccaccactgattaagagtggggtggcaggtattagggataatattcatttagccttctgagctttctgggcagacttggtgaccttgccagctccagcagccttcttgtccactgctttgatgacacccaccgcaactgtctgtctcatatcacgaacagcaaagcgacccaaaggtggatagtctgagaagctctcagcacacatgggcttgccaggaaccatatcaacaatggcagcatcaccagacttcaagaatttagggccatcttccagctttttaccagaacggcgatcaatcttttccttcagctcagcaaacttgcatgcaatgtgagccgtgtggcaatccaatacaggggcatagccggcgcttatttggcctggatggttcaggataatcacctgagcagtgaagccag

SEQ ID NO: 1480 - DNA, 283 bp, Homo sapiens
ggcgctggggaagctgaagcagttcgatgcctaccccaagactttggaggacttccgggtcaagacctgcgggggcgccaccgtgaccattgtcagtggccttctcatgctgctactgttcctgtccgagctgcagtattacctcaccacggaggtgcatcctgagctctacgtggacaagtcgcggggagataaactgaagatcaacatcgatgtactttttccgcacatgccttgtgcctatctgagtattgatgccatggatgtggccggagaacagcag

SEQ ID NO: 1481 - DNA, 530 bp, Homo sapiens
aaatttgatgtgaaggaagtatcttaggagaagctaaaaaatacataaatgaacgaagactggaagaatcttcaagatgttaaaaactcatataaccacagaaataaaaactccaattgttaaagtcatagtaaagagaaggaagcaaatcataataggtcaaaatataaagataaaatgaccactgaaaggataataaagattgtgaaaatcaggacactctcaaacagaaaccaaaagcggaagagagatgaaagcaagagcaaagtaagacacaatttgtacgatcaacagaactggcactagggtcaagagcagcttcactttgcagaattcatcaatttgaagaacttctgtgatcttttgtgatggcctgttacaatgaacagtagtttcatttatatctgttccactaaaaaccactgctttttccaatatcgtgatcacagtaatgtttacaaagaatcaaacagaacataagaaggactaaagatacttctgaaacagatattaaaaaataataatgatgg

SEQ ID NO: 1482 - DNA, 420 bp, Homo sapiens
  misc_feature 393, 402: n = A,T,C or G
ctgccaaggagaccctgttatgctgtggggactggctggggcatggcaggcggctctggcttcccacccttctgttctgagatgggggtggtgggcagtatctcatctttgggttccacaatgctcacgtggtcaggcaggggcttcttagggccaatcttaccagttgggtcccagggcagcatgatcttcaccttgatgcccagcacaccctgtctgagcaacacgtggcgcacagcagtgtcaacgtagtagttaacagggtctccgctgtggatcatcaggtcatccacaaacttcatggatttagccctctgtcctcggagtttcccagacaccacaacctcgcagcctttggccccactctccatgatgaaccgcagcacaccatancaggccctncgcacagcaagccctcct

SEQ ID NO: 1483 - DNA, 233 bp, Homo sapiens
ccatggaaggcgaatttgggtttgaaattcctgatatagatgctgaaaagttaatgtgtccacaagaaattgtagattacattgcagataagaaggatgtatatgaataaagtatcagaccctttggctttgctgagagaggactcagatgatagtgacgaatgtctggcggtgaggacacattttggcattcttgctgactctgacagagtgattctgatggacttgtattt

SEQ ID NO: 1484 - DNA, 396 bp, Homo sapiens
cgcggtgcgacgaaggagtaggtggtgggatctcaccgtgggtccgattagccttttctctgccttgcttgcttgagcttcagcggaattcgaaatggctggcggtaaggccggaaaggactccggaaaggccaagacaaaggcggtttcccgctcgcagagagccggcttgcagttcccagtgggccgtattcatcgacacctaaaatctaggacgaccagtcatggacgtgtgggcgcgactgccgctgtgtacagcgcagccatcctggagtacctcaccgcagaggtacttgaactggcaggaaatgcatcaaaagacttaaaggtaaagcgtattacccctcgtcacttgcaacttgctattcgtggagatgaagaattggattctctcat

SEQ ID NO: 1485 - DNA, 546 bp, Homo sapiens
  misc_feature 461: n = A,T,C or G
aaaagtacttattttgtcacagcagccaagacactaacaaccacctaaatgtccaggacagttgaatggataaaataaatgtggtaatatacatacaaccaaatattatgtatccttaaaaaaaatcctgtcatatactacaacatggatgaatcttgaggacattacactaagtgaaataagccagtcacagaaggacaaatattgcatgaatccactaatatcaggtgtctaaaacagtaaaactcatcaaatcagaaagtaaaatggtggttaccaggggtcagagggagacgaaaattgggaggtgctgttcaatgggtataattttagtcatgcaagatgaaaagttctagagatctgctatataacaatgtacagacagttaacaatactatattgtacccttaaacatttgtggaagaaggtaggtctcacgttaagtgttttttaccacaatnaaaaaatatacagtcatggatacataaagagaaatgagctgttgggcaattttgttgttatacaaacatgatagtgtacttacac

SEQ ID NO: 1486 - DNA, 178 bp, Homo sapiens
aaaatccagaacttggactccatcgttaaaattatttatgtgtaacattcaaatgtgtgcattaaatatgcttccacagtaaaatctgaaaaactgatttgtgattgaaagctgcctttctatttacttgagtcttgtacatacatacttttttatgagctatgaaataaaacatttt

SEQ ID NO: 1487 - DNA, 498 bp, Homo sapiens
  misc_feature 210, 333, 486: n = A,T,C or G
ccaacatggtaaaatcctgtctctactaaaaatacaaaaaaattagccggatgtggtggcgtgtgcctgtagtcccagctactcgggaggctgaggcaggagaattgcttgaacccgggaggcagaggttgcagtgagccgagatcacgccactgcactccagcctggtgacagagcaagactccatctcaaaaaaaaaaaaaaaaaaangaaaagaaaaaattaattgtaagagattctatgcgtaaacatattggctaaagttaaaatggcattactgagttttttccataaattggacattggaataaaatcacaacagagttttcttanaacattgttctgctctgagaaaaactctgtaaagggttacaaaatgtttataaaaatcttaccttatggtcaaactaattaaaacaatagatttataaaatattaaaagctagctttaacattaaaaatatgcaaatggaaacataaaatttngttttctctttt

SEQ ID NO: 1488 - DNA, 355 bp, Homo sapiens
  misc_feature 266: n = A,T,C or G
aaaataaaaggagggctaatgtttcatgttgctttatacatccttctcctcaatacagaaccaggaatgtaattttcctaactcaggcaggcactgatactgatggacactgcgcgtgcacacacacacacacacatacacacacacacacacacacacacaccccctccccccaaacaacaaaattcagagtatgtcaaaggaaaaaggtttgttattgtattgatcaaaacccagtggaatcaacaccatctatcttagcttancaggtatgctgttttgatcttgagtctatattaatggaatctattgttgcattctgaaataaagaattttggatataccattatgtttt

SEQ ID NO: 1489 - DNA, 234 bp, Homo sapiens
ccagcgacctcccggttcaattcttcagtccggctggtgaaccaggcttcagcatccttccggttctgctcggccatgacctcatattggcttcgcatgtcactcaggatcttggcgagatcggtgcccggagcggaatccacctccacactgacctggcctcccacttggcccctcagcgtactgatttcctcctcatggttcttcttcaggtaggccagctcttccttcagg

SEQ ID NO: 1490 - DNA, 423 bp, Homo sapiens
ccatgtgtgcgcccagtgaaaagtttctgaacatgggtgcacccctgggagtgggcctgggtctcgtctttgtgtcctcattgggatctatgtttcttccacctaccaccgtggctggtgccactctttactcagtggcaatgtacggtggattagttcttttcagcatgttccttctgtatgatacccagaaagtaatcaagcgtgcagaagtatcaccaatgtatggagttcaaaaatatgatcccattaactcgatgctgagtatctacatggatacattaaatatatttatgcgagttgcaactatgctggcaactggaggcaacagaaagaaatgaagtgactcagcttctggcttctctgctacatcaaatatcttgtttaatggggcagatatgcattaaatagtttgtacaagca

SEQ ID NO: 1491 - DNA, 471 bp, Homo sapiens
  misc_feature 430, 443: n = A,T,C or G
ttcacttgtgtgcggaactcctcggaaccatggcgtccctttcccttgcacctgttaacatctttaaggcaggagctgatgaagagagagcagagacagctcgtctgacttcttttattggtgccatcgccattggagacttggtaaagagcaccttgggacccaaaggcatggacaaaattcttctaagcagtggacgagatgcctctcttatggtaaccaatgatggtgccactattctaaaaaacattggtgttgacaatccagcagctaaagttttagttgatatgtcaagggttcaagatgatgaagttggtgatggcactacctctgttaccgttttagcagcagaattattaagggaagcagaatctttaattgcaaaaagattcatccacagaccatcatagcgggttggagagaagccacnaaggctgcaaganaggcgctgttgagttctgcagttgatca

SEQ ID NO: 1492 - DNA, 227 bp, Homo sapiens
ctggtcaggaactctgggaggaaggcggcaaagaagccatcaaagtcgactgaggccatgttgtagatggcgatgccaatctcctcctgcagaagatcatgggacttgtggaccaggacctggagcagcacgttcacaaactggaacagcatggcagtccggaagatcttcttgtggtacagcttctgcttggtgttgagagtctccaagtagaagagattttgttt

SEQ ID NO: 1493 - DNA, 475 bp, Homo sapiens
ctgccaaggagaccctgttatgctgtggggactggctggggcatggcaggcggctctggcttcccacccttctgttctgagatgggggtggtgggcagtatctcatctttgggttccacaatgctcacgtggtcaggcaggggcttcttagggccaatcttaccagttgggtcccagggcagcatgatcttcaccttgatgcccagcacaccctgtctgagcaacacgtggcgcacagcagtgtcgacgtagtagttaacagggtctccgctgtggatcatcaggccatccacaaacttcatggatttagccctctgtcctcggagtttcccagacaccacaacctcgcagcctttggccccactctccatgatgaaccgcagcacaccatagcaggccctccgcacagtaagccctcctaggagtttgtaacgcagagactctgcctgggcaatggcacacagacctctagtgg

SEQ ID NO: 1494 - DNA, 480 bp, Homo sapiens
  misc_feature 400: n = A,T,C or G
aaacagagaatatatattttaatacatcgtttaagtttatgattaattatctattactgaggataagaatctttgcctgtgctcattcagcatttgcacttcatttatgatctgccttctcatagcttctgttaatttttatactagagacatttatttgtttgtataaatgttgaaggtttttttttgttgttgttgtttttgagtcagagcctcgctctgtcacccaggctggagtgcagtggcatgatctcggctcactgcagcctccatctcctgggttaaagtgattctcctgcctcagcctccagagtagctgggactacaggcatgtgccaccaagcaaggctaatattttgtatttttagtagagatggggtttcgtcctgttagccagggnggtctcgatctcctgacctcatgatctacctgcctcggcctcccaaagtgctaggattacaggtgtgagccaccgtgccc

SEQ ID NO: 1495 - DNA, 497 bp, Homo sapiens
  misc_feature 304: n = A,T,C or G
cctttagttattttgtctcttgttgctggagcccatccactgtctgacatcatagccatgggcaagaggatattgccttggctctgtctgagtgctggattgtgaccggccataagtagcctttgcaaaggaagctaatggacagtgcctgaattaagggtgcttaccctatcctagaaagcgttaaagtcaaagcggaaaatatacatggtacccaaaatcaaggagactgccagagaccagcaggggatctaagggatttaccactgggttagcacagacactacacttgaagatttcctancggctgctgctgctgtttccatgataagaattcagtgagacaaagaacctgccaagctcattaaccgagtagcaggaagagctactgtgtagcctctggtgttccccaactgactcagccctgcagatgggacatcctgtaggtcatgtgaatatcaagttactgagggatgttctcaggacaagcctagcat

SEQ ID NO: 1496 - DNA, 423 bp, Homo sapiens
gcttccattctggtggcaaccggggtcgtggtcggggaggaaaaagaggaaaccagtcggggaagaatgtgatggtggagccgcatcggcatgagggtgtcttcatttgtcgaggaaaggaagatgcactggtcaccaagaacctggtccctggggaatcagtttatggagagaagagagtctcgatttcggaaggagatgacaaaattgagtaccgagcctggaaccccttccgctccaagctagcagcagcaatcctgggtggtgtggaccagatccacatcaaaccgggggctaaggttctctacctcggggctgcctcgggcaccacggtctcccatgtctctgacatcgttggtccggatggtctagtctatgcagtcgagttctcccaccgctctggccgtgacctcattaacttgg

SEQ ID NO: 1497 - DNA, 409 bp, Homo sapiens; identical to SEQ ID NO: 840

SEQ ID NO: 1498 - DNA, 345 bp, Homo sapiens
cctccgtccagcatcagctcaaaggcgaaggacacattgtggaccttctgatcgaagctttccggagtcaggtagaagtggtggagaggaacaaagtagtcttccagaaggcccatgagcagaaccaggtacacgccatctgcaaactgggtctccagttccgtcacctccaaattcagcttgttcaggtgcttgttcacaaaagtgatgagagacttcttcaccacgctgagcttatccggggcgtggtcgaacagcgtgtcgaaggcatcccgctcgaaccggcccatcatcatctctatagttgtggtcagctcctccgagatgtggctggaatgcagcagg

SEQ ID NO: 1499 - DNA, 387 bp, Homo sapiens
  misc_feature 26, 225, 301, 371, 373: n = A,T,C or G
ttttttttttttttttgttgtcccanatttattgaaaataatacagcactacagaaaaaattcaaacaggtccccgaggcgttttgaaattcatcccaactgtaggctgagtgacctgaaggttggacagactgccgaagtccaaaagcttcagcatttccttagtgtcaggatctacttcaataatctcctgatccaaggctgagacctcaggaacataattgnctctcctttctctctcctcctcctgcagcttgatggagatacctcttactgggcctctctgaattcgcttcatcanatgcgtgacgtaacctgctatcttgttgcggagctttttgctggggataatggcgatctcctcgcacacncncttgttcgtgtgga

SEQ ID NO: 1500 - DNA, 243 bp, Homo sapiens
aaaatccttcagaatacatttatgaaccaatgcgactggacttagccacacacaatggaaattcagaccttgactatttggtgtttccagttcacaaaggtgatgaagactgtcttgggagcagcttaatcccaaaatttgtacatttcttgctgctcctggcgtggaaacttaagtgagaccaccaaatacattggtcctgtccaattctactgaatgggggtggacctggcatttatctgg

SEQ ID NO: 1501 - DNA, 537 bp, Homo sapiens
  misc_feature 492: n = A,T,C or G
ccacatcaaaagaatcactgataatgacatccagtccctggtgctagagattgaagggacaaatgtaagcaccacatatatcacatgccctgcagaccccaagaagacgctgggaattaaacttcctttccttgtcatgattatcaaaaacctgaagaagtattttaccttcgaagtgcaggtactagatgacaagaatgtgcgtcgtcgctttcgggcaagtaactaccagagcaccacccgggtcaaacccttcatctgcaccatgcccatgcggctggatgacggctggaaccagattcagttcaacttgccagacttcacacggcgagcatacggcaccaattacatcgagaccctcagagtgcagatccatgcaaattgtcgcatccgacgggtttacttctcagacagactctactcagaagatgagctgccggcagagttcaaactgtatctcccagttcagaacaaggcaaagcaataactggnattgtgactcgagggatagaccccctggatgtgactcttcttttt

SEQ ID NO: 1502 - DNA, 176 bp, Homo sapiens
ctgtccaatggcaacaggaccctcactctattcaatgtcacaagaaatgacgcaagagcctatgtatgtggaatccagaactcagtgagtgcaaaccgcagtgacccagtcaccctggatgtcctctatgggccggacacccccatcatttcccccccagactcgtcttacctttc

SEQ ID NO: 1503 - DNA, 455 bp, Homo sapiens
ctgtcaaagccatcatatatcagtatatggaagaggtgggtttttatttaactacttggataatttgtagctacttttatgatgtagtaatgtcactgtttaaccaggtttggatattagatgatcctaacaattcactatcctgtggcctaaagagacaggaattgatatcctttataaggaaaaaagtctattcacaggagccgagcagattgctcactgctgtgtagtaccctggtgagaggagataaatggagcaaggctgtaggttggagcccctcagtagaatcatagattttgagctgcaagatgatgcaggaggccaaccaagcttcttgttgctggtgaggaatgtgaggttgaagcttgtctgtgctgatgcagtgcgtgattgagtggatctctggctcccgtccatgtgtcctgacacccagtctggtactttcattatgcca

SEQ ID NO: 1504 - DNA, 266 bp, Homo sapiens
ccatggctaggtttatagatagttgggtggttggtgtaaatgagtgaggcaggagtccgaggaggttagttgtggcaataaaaatgattaaggatactagtataagagatcaggttcgtcctttagtgttgtgtatggttatcatttgttttgaggttagtttgattagtcattgttgggtggtgattagtcggttgttgatgagatatttggaggtggggatcaatagagggggaaatagaatgatcagtactgcggcgggtagg

SEQ ID NO: 1505 - DNA, 195 bp, Homo sapiens
ccagtttaccctgaaaattcccgtgagaagggagatggcggtagcagcgacgtgcccacctgtgatttctggggcccttcttttctctttgctggttcagggactcaagtccaggccaatttgactcaaagtccaagggagaagagaaagaggggggtggggagtgccaaattcctttattttgccaattgtttc

SEQ ID NO: 1506 - DNA, 470 bp, Homo sapiens
  misc_feature 383, 385, 409, 411, 421, 447, 458: n = A,T,C or G
aaaatattaacagtcaggcagggcgcggtggctcatgccgtaatctcagccactgaggaggctgcggcaggagaattgcttgaacccaggaggtggaggttgcagtgagccaaaattgcaccactgcactccagcctgggcgacagagcaagactctgtttcaaaaaaaaaaaaaagatttaagatggtaaattcgatgttatgttctttaccacaatatttttcttaaaggataactaaaaaaatcagagttataaagctatccaaaaattaccttcaaatcacaaaattgtttcacatagagaaaatacaaattcatcaacaaacacacagtaaaactaagattattttcctgactactcacctgacaagataaaaaaacntnaaagatcagcccagaaaaaatatntnagataagctntgaacaaagttggggtcatatttatngacaacatgcncattcatatgtg

SEQ ID NO: 1507 - DNA, 398 bp, Homo sapiens
ctgctggagtcggaactgctgcctttgtttggcggccttgtttcttaaatcagttccctcttaggatttattacactaaaaaaaaaattagtttttgaaaagaaataggagaatacagaaacatgaatttcacgaggctatcatctaacagtgggggctttctacacacgtggtgccaaaaatgtgtcattctgagtcaattgcaattcctctctaggagtgaaaagagataaaagataagccaagaaccctggacagattcttggtgttggtgacaaagaggaaaggacctgagaatggggctggtggggagagggggggtgtctgctggataccaggaggacaaggaccactcccacctgcaggggtgcccaggacctagttgggctcggcctcag

SEQ ID NO: 1508 - DNA, 483 bp, Homo sapiens
aaaaaggaaaaactaaaagggactgcctgctttttttactgtaaacacagccctggatattaaatcccaaacaggaatctctcaggcatcagagagtgtcaagtgagtcaggaataacacaaaataaaggaatgggggagaaaataaaaaaaaaacaaagcaaaattaaaataaatgtcagtcactttgaggaactatacttacgtatatgatgttatgagaatctggcagggcctagaagcaggccaaacaggaagttcatttatccaaccgaagaggatcatgttcattgcttccggttttgaggacaggatattgtagggaacttgatatgatcaataacgcttgtctgccttacacagaccttagccagggatcagcctaatcttgaagaatcattcaaataattttggcaattattataaggacttagaactgactgcacccagtgttcagtgattcttgccttctgttttgttactg

SEQ ID NO: 1509 - DNA, 200 bp, Homo sapiens
ccaattgaaacaaacagttctgagaccgttcttccaccactgattaagagtggggtggcaggtattagggataatattcatttagccttctgagctttctgggcagacttggtgaccttgccagctccagcagccttcttgtccactgctttgatgacacccaccgcaactgtctgtctcatatcacgaacagcaaagcg

SEQ ID NO: 1510 - DNA, 242 bp, Homo sapiens
ctgtggcctctgccaccccatgggtgccagtcttaagtttcagagcatcactggtactcaccctggtcctgcagctcctgggcccagagacaggatttcgtgttagcctcctcgtactgtgctggggtgatgataaaactaacaacccaggctggacgcagtggctcacacccgaaatcccaacattttgggaggccgaggtgggtggatcaactgaggtcaggagttcgagaccagcctgg

SEQ ID NO: 1511 - DNA, 501 bp, Homo sapiens
  misc_feature 455: n = A,T,C or G
gagatcatctgctccagaaccaaccaggagctgcaggaaattaacagagtctacaaggaaatgtacaagactgatctggagaaggacattatttcggacacatctggcgacttccgcaagctgatggttgccctggcaaagggtagaagagcagaggatggctctgtcattgattatgaactgattgaccaagatgctcgggatctctatgacgctggagtgaagaggaaaggaactgatgttcccaagtggatcagcatcatgaccgagcggagcgtgccccacctccagaaagtatttgataggtacaagagttacagcccttatgacatgttggaaagcatcaggaaagaggttaaaggagacccggaaaatgctttcctgaacctggttcagtgcattcagaacaagcccctgtattttgctgatcggctgtatgactccatgaagggcanggggacgcgagataaggtcctgatcagaatcatggtctcccgcagt

SEQ ID NO: 1512 - DNA, 556 bp, Homo sapiens
  misc_feature 525: n = A,T,C or G
aaatgacccaaaactattaataggtattttaagcaataattattaaaaacagaagtgctacatcacctgtctttcgccctgactctccaaatgaacataaagacacaccaaaaggctggtaacagagctagctgggacaatcactgcatctatagaacagccaataccttgaaaaactaggcacaagtacatgaggaattcttatcaaagatcatgcacaatccatgccacttaaatgggttttagctgaggttttgctcatgttactctgaatttctaaggacagatcagtgaccctcttagcctgagcagaaagcatattcttcccactgcagtttcctacacaatttagtcctgattagatgaggcattatagcagcacctgaagtagagcctccagaatccactgcccttttcatcaaaggctatttggttccaccctcaggattggcatactcacgagacatttcacaatcctaatgcatactttaggttacttaattaaccaagcaatatgctctgtcnaagaacttatttcaagtcaaagcaaaaaagg

SEQ ID NO: 1513 - DNA, 290 bp, Homo sapiens
ccagtgcagaaacgtttaatagaaataaaaaggtctgcatagagccgaggctcggagccacccctctgccgcacatccagtacagagaggattctataaagttcacactttttcattaagtagtagtagaaatacggtgaggccctgagactggcctggtgagcgaggaaaggccgctgggcgcttccactctgcaggccggggctgaaataacccgagttccgttctcacagaaaggtgcggctgccacctcttgacacagaggccggatgggcaggtgtcctcgatgg

SEQ ID NO: 1514 - DNA, 451 bp, Homo sapiens
ctgtggggagaggccgcctcctctgatggggtctcgatgctgctgctctgttcctggtctggcacgtcctcctcttcctgctccaagctgaagttctacctcgagctcctgaaaaatctcatccatgaagtcctgggagttctgtttgtaagacacagctaatcgaattgcatcattgaagagcttcacaacattggtaccatcagcagccgagacgaaatacaggggcagggagaacttcttggcaaaattgaagcttttttgggtcacgtttatgtctgcatcaattttattggccaggctggtcttgaactcctgacctagtaatccacctgcctcggcctcccaaagtgctgggattacaggcgtgagccactgcacccagccagaaatgccgtctaatctttggtttatcttaattagccaggacacttggagtgcatcccgaagt

SEQ ID NO: 1515 - DNA, 316 bp, Homo sapiens
  misc_feature 60, 103, 104, 129, 133, 260, 265, 266, 306, 313: n = A,T,C or G
ctggcaagagacttcctgaggcacatcagctacgttggtcaatttagggcacggtctggntctgcagctttgaaaggtggattctttctattagcacactttnntaagagggattgtaaaggattaacntcantcaccagaaacgaaacaccacttcagaaattcagagacctctgatcaacagaacagacatttgggctttaactgctaaagcagctacctacttggggaaaccatggcattctgctgcctggacagcnggaannaagagagatttcagagttactggcacgaggacaaagcctntcagctngct

SEQ ID NO: 1516 - DNA, 314 bp, Homo sapiens
  misc_feature 241, 269, 293: n = A,T,C or G
ccatggcactctgatcatggttatatccaagaaagcataaaataaccaatgtcctgatatgcaatctggatgtgcagcatttacagcaaacaacataaaaagaaagaaagaagaatggaaaagtaaagaagaaaaaaaccaccacaaagtcccaaacctcagaaattaacattcacttaagaacacagtggtgaagacttttggtagcaaaatttgcacggttcttaaaatgggagtcttnaaaagtacttcttcaaattcaaaagctnagaaaaccaaagagggaacagttncacaggcttagtggagatgcc

SEQ ID NO: 1517 - DNA, 357 bp, Homo sapiens
  misc_feature 327, 332, 354: n = A,T,C or G
aaagatttctgttaatttgaaagaacaaaaacaagacagaacttctggtactctaatcaggatgattcctaacaagtcagtcatttgtgaacttagtggactttttggttactttaatttgcatatattctccagttacatcggactctatctgtggccttgttcttcatttcagtgttaatcagctaaacagaagttgttgcttatgatgtgtgagtgaacatatgccactgcctggcctttttttcttcagagcttgttgtctttttcgctatattagactttgcagtatgcccagaagctttccttcataaaatagaaagaaanaaacntttggcttatttttcactgtancta

SEQ ID NO: 1518 - DNA, 534 bp, Homo sapiens
cctcggtggagacgcagaccccatgaagaggaaaccctggacatccctgtccagcgagtctgtgtcctgcccccagggatcgctgagccctgcaacctccctaatgcaggtctcagaacggccccgaagcctccccctgtcccctgaattggagagctctccttgatgccctctgttagggcccaccccaatcccagggcagaaggacatgagggagcaaagagcttgaggaatgccatactccggctggtccgggacatggaaattcggactcagggaggacccgggctgggcaatgactgggagacttgcccgggttcccaggacttgggggtcctgactcccagccctcatcctgccttacccctctgttcccagccccagcctttctaagccattgggaatagaatggccccttttgttctggtgtctaggggtgattgtgccaaagctcttatttccagtgccaagcccccagaggcttgtaagagttgggatgagggatggagagggactgggtctctgggaacaggt

SEQ ID NO: 1519 - DNA, 414 bp, Homo sapiens
ctggatctttccggggattcagtcaagaccatcgccaagctatgggatagtaagatgtttgctgagattatgatgaagattgaggagtatatcagcaagcaagccaaagcttcagaagtgatgggaccagtggaggccgcgcctgaataccgcgtcatcgtggatgccaacaacctgaccgtggagatcgaaaacgagctgaacatcatccataagttcatccgggataagtactcaaagagattccctgaactggagtccttggtccccaatgcactggattacatccgcacggtcaaggagctgggcaacagcctggacaagtgcaagaacaatgagaacctgcagcagatcctcaccaatgccaccatcatggtcgtcagcgtcaccgcctccaccacccaggggcagcag

SEQ ID NO: 1520 - DNA, 203 bp, Homo sapiens
  misc_feature 148, 193, 196: n = A,T,C or G
ccaacagtgtatccatcacgttagccctgctggagggaagggacccacattcacctgccctctgacctgccccttgatcccatatctattaccgtgtccataggaataataggtaagggctctgtctctgtcaagccatgtaacaaangacactgttaaaaaaaagaaacaaagtctggcatcagagggagcntgnggagagc

SEQ ID NO: 1521 - DNA, 492 bp, Homo sapiens
  misc_feature 408, 439: n = A,T,C or G
ccggcggtggggctggacgcaggtgcaactgacatgggtgaaccccagggatccatgcggattctagtgacagggggctctgggctggtaggcaaagccatccagaaggtggtagcagatggagctggacttcctggagaggactgggtgtttgtctcctctaaagacgccgatctcacggatacagcacagacccgcgccctgtttgagaaggtccaacccacacacgtcatccatcttgctgcaatggtggggggcctgttccggaatatcaaatacaatttggacttctggaggaaaaacgtgcacatgaacgacaacgtcctgcactcggccttcgaggtgggcgcccgcaaggtggtgtcctgcctgtccacctgtatcttccctgacaagacgacctacccngatagatgagaccatgatccacaatgggccnccccacaacagcaattttgggtactcgtatgccaagaggatgatcgacgtgcg

SEQ ID NO: 1522 - DNA, 437 bp, Homo sapiens
  misc_feature 388, 389: n = A,T,C or G
ccacctggagacggtgattttgggcctattgaagacacctgctcagtatgacgcttctgagctaaaagcttccatgaaggggctgggaaccgacgaggactctctcattgagatcatctgctccagaaccaaccaggagctgcaggaaattaacagagtctacaaggaaatgtacaagactgatctggagaaggacattatttcggacacatctggtgacttccgcaagctgatggttgccctggcaaagggtagaagagcagaggatgactctgtcattgattatgaactgattgaccaagatgctcgggatctctatgacgctggagtgaagaggaaaggaactgatgttcccaagtggatcagcatcatgaccgagcggagcgtnncccacctccagaaagtatttgataggtacaagagttacagcccttatg

SEQ ID NO: 1523 - DNA, 315 bp, Homo sapiens
ctgctgcagctccccaggggccagccccgcctctgcgtctgggtctccatcccaagaccattcaccctccgagttgctgctgtcctcctcgccctcctcctcgtcctcttcatcgtcttccaccccatgccgagtgctcaggggcctcagtatccctctctccgagaatccctcggtgtcgtcctcttcagagctgttcaggtcaaagaggtctttaaattgcttcctgtcctcatccttcctgtcagccatcttccttcgtttgatctcagggaagttcaggtcttccagccgctctttgccactgatctccag

SEQ ID NO: 1524 - DNA, 269 bp, Homo sapiens
agcgggtgaagaaattagaagaagtggaaaggaaaaaacgccaaagggagttggaaattgaagaacgagaacggcgtagagaggaagagagaagacttggcgatagttccctttctagaaaggactctcgttggggagatagagattcagaaggcacctggagaaaaggacctgaagcagattctgagtggagaagaggcccgccagagaaggagtggagacgtggagaagggcgagatgaggacaggtctcatagaagagatgaagag

SEQ ID NO: 1525 - DNA, 413 bp, Homo sapiens
aaaaaccatggcattccttaagattgcagatctcaaattatagtaaaataagttgagtttaagaaaatgaagagtataagtttgattagggatggagggtgagaggagcttgccagatgggccatatcataataggctttatattctttgcaaaagcaattggattttatcttgtagtcaatggggagcaaattaaaagattttaagtggtgtgtattctaaaaagatcactgtgggatgggtggctggcaggggatgggaggatgaagaaaagttgggtaatgggggccgggcacggtggctcactcctgtaatcccagcactttgggaggccgaggcgggcggatcaccgaggtcaggagatcgagaccatcctggctaacatggtgaaaccccatgtctactaaaaatac

SEQ ID NO: 1526 - DNA, 441 bp, Homo sapiens
  misc_feature 408: n = A,T,C or G
ccatgctgggggaacagttcatggttggggaggagatctgtggggctgtggtgtctgtccgctttcaggaagacattatttcaatatggaataagactgccagtgaccaagcaaccacagcccgaatccgggacacacttcggcgagtgcttaacctacctcccaacaccattatggaatacaaaactcacaccgacagcatcaaaatgccaggcaggctgggcccccaaaggctcctttttcaaaacctctggaagccgcggttgaatgtgccatgaccctctccctctctggatggcaccatcattgaagctggcgtcatcggagtctcttgttctgttggcgtgctacctggaagatccttctgtcctggacaagaggaattggaagagcattttatgttttaangaacaggctgacacgcagcagctacaacaacag

SEQ ID NO: 1527 - DNA, 441 bp, Homo sapiens
ctgcagcattacatgaaagaaagcgcccagcttctgtcggaaaaaatcgcgttcaaaacctcggatttcagccgaggctctcctaatgccaagcccaaagttttcacttgcgaagtgtgtggaaaggtctttaatgcgcactataacttaacccgtcacatgccagtgcacacaggagccagacccttcgtttgcaaagtgtgcggaaaaggtttcaggcaagcaagcaccctgtgcaggcacaagatcattcacacgcaggaaaaacctcacaaatgtaaccagtgtggcaaagcatttaatagaagttccactttaaacactcatacccgaatacacgcgggctacaaaccgtttgtgtgtgaattctgtggcaaagggtttcatcaaaaagggaattacaaaaaccacaagttgacccacagcggggagaagcagttc

SEQ ID NO: 1528 - DNA, 467 bp, Homo sapiens
ctgactttgtcgaacaagtgaatccctctgaaataacgcttccacaactgttttttcactggcattaacagcagtaactgcgaatacactttcctcttctaatgcagactgtattctgtctctatacaaagaagccagcagcctccatgtgaccatctcctgttgaagaagccagagcatactggctgtttttgaaaatttttgaagtccaggtgttgctcgactcactattttactcagtatattcacctgactaccacagatgttttcatactcttccacaagatcaaaaactgtactcgaagagtgcttcagaaaagactgcaggaaatcagaaaacatactcatggatgcagcttctccaggatcatcctcacgtaacataacagcactgatagttacatcttctgttatactgtggggctctgtgtttgtgaacagcccggaacgctgtgatgaaaatgcag

SEQ ID NO: 1529 - DNA, 266 bp, Homo sapiens
  misc_feature 257, 262: n = A,T,C or G
ctggcttcactgctcaggtgattatcctgaaccatccaggccaaataagcgccggctatgcccctgtattggattgccacacggctcacattgcatgcaagtttgctgagctgaaggaaaagattgatcgccgttctggtaaaaagctggaagatggccctaaattcttgaagtctggtgatgctgccattgttgatatggttcctggcaagcccatgtgtgttgagagcttctcagactatccacctttgggtcgntttgntgtt

SEQ ID NO: 1530 - DNA, 384 bp, Homo sapiens
  misc_feature 290: n = A,T,C or G
ccaggctggtctcgaactcctgaactcaggtgatccgcccacctcggcctcccaaagtgttgagattacaggcatgagccacgtgcctggcccagtcatcggatttagggtccaccctaatccatgataacctcatgtctgtctacaaagaccctatttccaaataagcccatattctgaggtgaattctcagaatatgaattctcagaatatgaatatgaattctcagacatgaattcttgccagacactactcaatccagtggagcaggggagctgggactctccccngatggcaatagggagccacagaggctgtgtgagcaggggcagaatgaggtcagatgtgcctgtcagaaagccctgcagccccatctcatccagg

SEQ ID NO: 1531 - DNA, 485 bp, Homo sapiens
tactgtggctagccgcctttcagacactaaagctgctggggaagtcaaagccttggatgacttctataaaatgttacagcatgaaccggatcgagctttctatggactcaagcaggtggagaaggccaatgaagccatggcaattgacacattgctcatcagcgatgagctcttcaggcatcaggatgtagccacacggagccggtatgtgaggctggtggacagtgtgaaagagaatgcaggcaccgttaggatattctctagtcttcacgtttctggggaacagctcagccagttgactggggtagctgccattctccgcttccctgttcccgaactttctgaccaagagggtgattccagttctgaaaaggattaatgattgaaacttaaaattgagacaatcttgtgtttcctaaactgttacagtacatttctcagcatccttgtgacagaaagctgcaagaagggcactttttgattca

SEQ ID NO: 1532 - DNA, 562 bp, Homo sapiens
aaagcaacaaagtaaaataaaatcccccaaatgacaaggtatcagaaatccagacttcgttacactctatttgtgaaaatgttcagccattttattgttctgtaaaggaaccatcatctgggtcaaaaatgaattctataaatcaaagaatattctacaccttggaaaagaaaatcagcagtaacattctcactgaatattgtaaattacatttttcttcataaaaggtacatactattctgcacttttccaccaaaagcagtggtgtgttatgcttgttatataaaaaaagttatatcctgtggcaggaaaaaccctttctctttcacttttactaaacaactggagaaaatgttcaagtctgtataaagttgcctataagctggaaagtgaacttgttcaatctccatttacattttagtgcattttttgacaattgtcacatttttaacaaaagtaagaaaatgcatatagcactaaagagtgtttcatcaaatgcttaagggattaaaaaatatggagcagagaacaaaatcattgtgaatggatgaactgttgtaaa

SEQ ID NO: 1533 - DNA, 305 bp, Homo sapiens
cctcggtgggtcttgcggggcagcttcttggtgtgccaacgactggtgacccctttgtagcctttgcccttggtcaccccgatgacgtcgatcatctcatcctgcccaaacacttggttcacaggtacctgctgctcaagcctctcgcgggcccagtccagcttctcggccacagtgcctccgttcacctggatctccatcaggtgggccttcttctggcgcagaggaagcaggcgcatctgggtgtgggcaatgacacggatgacttggcagtacttcttcatgctgctgaagtccttctccag

SEQ ID NO: 1534 - DNA, 348 bp, Homo sapiens
ccaaagtggaacaggtgaagttcgatgccacatccatgcatgtcaagcctcaggtggctgcccagcagaagatggtagatgatgggagtggggaagtgcggggcagccaggccagccaagatgaaattacagcatcagcttatcaagccgtcatcctggaccagaagtacaatggtgaaccagtccagatccgggtcccaatgggcaaggagccacctcatcttatgtccatcttcaagggacgcatggtggtctaccagggaggcacctcccgaactaacaacttggagaccgggccctccacacggctgttccaggtccagggaactggcgccaacaacaccaagg

SEQ ID NO: 1535 - DNA, 350 bp, Homo sapiens
cgaaaggggagttcaaggagacgggggcgacgcggctgagggcttctcgtcggggtcggggctgcagccgtcatgccggggatagtggagttgcccactctagaggagctgaaagtagatgaggtgaaaattagttctgctgtgcttaaagctgcggcccatcactatggagctcaatgtgataagcccaacaaggagtttatgctctgccgctgggaagagaaagatccgaggcggtgtttagaggaaggcaaactggtcaacaagtgtgctttggacttctttaggcagataaaacgccactgtgcagagccttttacagaatattggacttgcattgattatactgg

SEQ ID NO: 1536 - DNA, 106 bp, Homo sapiens
ccacggcgcttggaatcctggttgttgctggatgctcttttggtatctcctaatcgcaaaaaaagtgacagcctgaagcagccacaaaatcctgtgttagaagcag

SEQ ID NO: 1537 - DNA, 442 bp, Homo sapiens
cctggtctccacgagctccgtgtcctgggtctggtcctccccatcccgctgccaggtcagtgtgatctccgcagggtagaagcccagggcccagcacctcagggtggcctcatggtcagagatggggtggtgggtcatatgtgtcttgggggggtccgtgcgctgcagcgtctccttcccgttctccaggtatctgcggagccactccacgcacgtgccatccaggtaggctctcaactgctccgcctcatgggccgcctcccacttgcgcttggtgatctgagccgccatgtccgccgcggtccaagagcgcaggtcctcgttcagggcgatgtaatccttgccgtcgtaggcgtcctgccggtacccgcggaggaagcgcccgtccgaccccacgtcgcagccatacattatctggatggtgtgagaaccggcctcgctc

SEQ ID NO: 1538 - DNA, 423 bp, Homo sapiens
  misc_feature 404: n = A,T,C or G
ctgaagagtcaacttgggcctggaggactgataaagtttgtgattttgagggcctctaaaagtattaaagcagcagcagccgctgcacgcagacatgagggctaggctaaaacagtaaggtcaagttgtttggacagaaaggctacagggtgtggtcctggctcttgtgtaagaattccgaccacgctaaccatgcctaggaaggaaaagagttgttgttttgtagaaggtgctggggtttgagagatcagtcggacacgattggcagggaaagcacgtgtgcttttacgagaattacgccgagataggtaacagatgaggaagaaatctgggcttgactgaagtaatgggggctgtctgtgaagctttgcagcagtacagcccaggtaatttgctgagcctanggggtgtcagggtcagtct

SEQ ID NO: 1539 - DNA, 465 bp, Homo sapiens
ccaccattatgtctgggtcaaaggccaaggtccggaaagcgctgcaattagaagtggatcggttggaagaactgaaaatgcaaaacatgaagaaagtgattgaggcaattcgagtggagctggttcagtactgggaccagtgcttttatagccaggagcagagacaagcttttgcccctttctgtgctgaggactacacagaaagtctgctccagctccacgatgctgagattgtgcggttaaaaaactactatgaagttcacaaggaactctttgaaggtgtccagaagtgggaagaaacctggaggcttttcttagagtttgagagaaaagcttcagatccaaatcgatttacaaaccgaggaggaaatcttctaaaagaagaaaaacaacgagccaagctccagaaaatgctgcccaagctggaagaagagttgaaggcacgaattgaattgtgggaacagg

SEQ ID NO: 1540 - DNA, 296 bp, Homo sapiens
  misc_feature 7, 138, 182, 183: n = A,T,C or G
acctctngatgtcaccatggagacatcaagaggtcatgattgcagaagaggtgactggaattgaatgacatgatccaggggaggccggccacaaatgcagtaacatgaccaggatgggccggtggggctggtcaggtnacagtgtgagggacagaacggaccccttcactctggcctcctgnnggtctccaggtgtgacaggatccagcccgctggcaggaggaaggtcacgaagcaggaggtaagcccaacggccaattccatgatcccaagcttcccctccggcggcaacgaat

SEQ ID NO: 1541 - DNA, 143 bp, Homo sapiens
  misc_feature 27, 75: n = A,T,C or G
ttttttttttttttttttttttttttngatgttaatgactttactttgagatatgatggaaaaatattacaggtncacatggaaaagacatgatcaccaagtgaaaacaatctaaccagaaagctttaacatctgtcagttaa

SEQ ID NO: 1542 - DNA, 430 bp, Homo sapiens
ctgagagcactgactcaggcggggcaccctcaccaagtaagcagggggcattcagcatgccctctggttctgacccagagagaggggactgaaaataaaccctcttttgctctgtggctggcccactggctcaacatgagcgcttggcttggctgtgcctcatgagagagggagggagagagaggctttctgggccagagatgtttctgggagggtttgccagccttgtcttgagccatcagtgtggcaggggagcacaggggtgtaggtggagacactgcggaggccacgtgaaagtggcagctagctctactttcaaaagagaagcagtggttcagtgaccctgagcattctgtgtgcaggagggagctgcctggacagcaagtcatcactgcctctgaatacacacaaaggaggctgcctgtccagg

SEQ ID NO: 1543 - DNA, 335 bp, Homo sapiens
  misc_feature 207: n = A,T,C or G
ctggaagaacaattaagaataatggatcagaccttgaaagcattaatggctgcagaggataagtactcgcagaaggaagacagatatgaggaagagatcaaggtcctttccgacaagctgaaggaggctgagactcgggctgagtttgcggagaggtcagtaactaaattggagaaaagcattgatgacttagaagagaaagtggcncatgccaaagaagaaaaccttagtatgcatcagatgctggatcagactttactggagttaaacaacatgtgaaaacctccttagctgcgaccacattctttcgtcttgttttgttttgttttgttttt

SEQ ID NO: 1544 - DNA, 499 bp, Homo sapiens
  misc_feature 29, 397, 398: n = A,T,C or G
aaattttagaaaacctgtataaattactngtgcataacttaaagattattctgcctttggctaattgagtaattcccctccagcactagagaccgctcagtgctcttactagatgaactcagtaacgccttgagctgggttgattgaggatgtgtgaaaagctcacagagcccgatgcctgctgctatttcacggcaatgagcctttttctttctacactgaagattttcttcttatttaatgtggtttattttgggctcagaaataattgctctgttgaaaataatcctttgtcagaaaagaaggtagctaccacatcattttgaaaggaccatgagcaactataagcaaagccataagaagtgggtttgatcgatatattaggggtagctcttgnnttttgttaacattaagataaggtgactttttcccccctgcttttaggattaaaatcaaagatacttctatatttttatcactatagatcatagttattata

SEQ ID NO: 1545 - DNA, 95 bp, Homo sapiens
ctgcatgatgaagttcactgtcaaggactgtgatcccaccactggggagactgatgacgaaggctatgaggatgagtatgtgctggaagatctgg

SEQ ID NO: 1546 - DNA, 460 bp, Homo sapiens
ccttgcgcctgctaggaagtggcacatcttcctgctcagggcaccaaggtggttcagaaacgttaaggacgagccacagcgaaaagccgcagtcctcacaggcaagaagggataaataaatatgaggtgacccgcagcagctctcacctgggctggtgtgtcacaaccctgacccacccctaaaaaaaaaaaaatcaagaagcaacatcctaaggagaacagggccctactctacacagccctttctgagatgatcggcatacagcaggtgatgcaggctgcacactcagcagattcagcggctggaaacagcaagtgggtttcttcggatgaaagggaagaattcagtccaactgcaggaggggtgggagaggttccagatcctgggaaccacatcaccagacctcggccctttttgccaagtgacccccaccccaccctgatgtggtctacagggccc

SEQ ID NO: 1547 - DNA, 476 bp, Homo sapiens; identical to SEQ ID NO: 626

SEQ ID NO: 1548 - DNA, 316 bp, Homo sapiens
ctggaacagatgctcactgcgctggaccagatgcggagaagcatcgtgagtgagctggcggggcttttgtcagcgatggagtacgtgcagaaaactctcacggacgaggagctggctgactggaagaggcggcaacagattgcctgcattggaggcccgcccaacatctgcctagatcggctagaaaactggataacgtcattagcagaatctcaacttcagacccgtcaacaaattaagaaactggaggagttgcagcaaaaagtttcctacaaaggggaccccattgtacagcaccggccgatgctggaggaga

SEQ ID NO: 1549 - DNA, 162 bp, Homo sapiens
aaaatattttagataattcttaaactatgaaccttcttaacatcactgtcttgccagattaccgacactgtcacttgaccaatactgaccctctttacctcgcccacgcggacacacgcctcctgtagtcgctttgcctattgatgttcctttgggtctgtg

SEQ ID NO: 1550 - DNA, 141 bp, Homo sapiens
ctgtgccgggtggaggagatgcgccagtccctgagaattatcgcacagtgtctaaacaagatgcctcctggggagatcaaggttgatgatgccaaagtgtctccacctaagcgagcagagatgaagacttccatggagtca

SEQ ID NO: 1551 - DNA, 263 bp, Homo sapiens
aaaaaaaacaaccaccaaaaaaaatcaattggctaaaaaaaaaaaagtattaaaaacgaattggctgagaaacaattggcaaaataaaggaatttggcactccccacccccctctttctcttctcccttggactttgagtcaaattggcctggacttgagtccctgaaccagcaaagagaaaagaagggccccagaaatcacaggtgggcacgtcgctgctaccgccatctcccttctcacgggaattttcagggtaaactgg

SEQ ID NO: 1552 - DNA, 332 bp, Homo sapiens
ctcttttataaagctgatgttctgagcgaagaagcaatactgaaatggtataaggaagcacatgttgctaaaggcaaaagtgtttttcttgaccagatgaagaaatttgttgagtggttacaaaatgcagaagaagaatccgaatcggaaggtgaggaaaattaaatggctcaacaagcacaatacctaggttaccacacaccactttttgattgggaatgctgaaccatttgagaagagaaacttggcttctgttttcgcaaaggaaaaaaaaaataggataggcttcccttgtgcagagggagaaatggctttgtttttgttttgttttt

SEQ ID NO: 1553 - DNA, 389 bp, Homo sapiens
  misc_feature 365: n = A,T,C or G
ttttttttttttttttttatgtgttgtcgtgcaggtagaggcttactagaagtgtgaaaacgtaggcttggattaaggcgacagcgatttctaggatagtcagtagaattagaattgtgaagatgataagtgtagagggaaggttaatggttgatattgctagggtggcgcttccaattaggtgcatgagtaggtggcctgcagtaatgttagcggttaggcgtacggccagggctattggttgaatgagtaggctgatggtttcgataataactagtatggggataaggggtggtaggtgtgccttgtggtaagaagtgggctagggcatttttaatcttagagcgaaagcctataatcactgngcccgctcataaggggatggacct

SEQ ID NO: 1554 - DNA, 245 bp, Homo sapiens
aaacagacctttagtgactgaggtgtggtttaggacttcaaggttggatggcccaggcgggaaacagagtggagagctcagtaggccgtctgagactgctgctggcggtagccaccgcggcgcatgtagccctcgtttttgcggtagccgtccttctggtctcggaagtagcccccgtaggtgccctgcttgtggtcaaacacccgttcgttgttctccaccaggctgcccagcttctcggccag

SEQ ID NO: 1555 - DNA, 161 bp, Homo sapiens
aaagcacaactagctatttgtttacaaatgatatttttatgtatattttgtatagtgtatcatcatttttgccaaatatgtttttcattataaatgagtaaagagtacttaaggttgcattcacgtattacatgtttgttgttgtaaacctctccaatcag

SEQ ID NO: 1556 - DNA, 300 bp, Homo sapiens
aaaccaggggctcggatcaaccaggaccacaagcacaaatacatccacatcttggcgtacgcagcaagcgtggttgagacctggaagaagaacaagcgagtgagcatcaataaagatgagctgaagtcaacgtcaaaagctgtcgaaaccgttcacaatttgtgttgcaacgagaacaaaggggcctctgaactagtggcagaattgagcacactttatcagtgtattaggtttccagtggtagcaatgggtgtgctgaagtgggtggattggactgtatcagaaccaaggtactttcag

SEQ ID NO: 1557 - DNA, 379 bp, Homo sapiens; identical to SEQ ID NO: 487

SEQ ID NO: 1558 - DNA, 218 bp, Homo sapiens
gctgtctagttttgtttttgttttgagatggagtttcactcttgttgcccaggttggagtgcaatggcacaatctcagctcactacaacctccgccttccaggttcaagcaattctcctacctcagcctcccaagtagctgggattacaggcatgcaccaccatgcctggctaatatttttttgtatttttagtagagatggggtttcaccatgttgg

SEQ ID NO: 1559 - DNA, 481 bp, Homo sapiens
  misc_feature 354: n = A,T,C or G
aaaatgttttatttcatagctcataaaaaagtatgtatgtacaagactcaagtaaatagaaaggcagctttcaatcacaaatcagtttttcagattttactgtggaagcatatttaatgcacacatttgaatgttacacataaataattttaacgatggagtccaagttctggattttacattagatctgcatatataagacacttgtggtcaaatttcaagattggtaaagccagtttcaagctgcttatattttgagtacaggtttcactattacaaatatatgatgttaaactaacaaactcatgaccttcaaagatgtcttcgtcccacgcacacacatttgtaatttgngtccatttgctatttcccttcttctataatcttcaaattatatagttatgcattgagttccctatgcatctcacccatctcctttatctcagccttctcatactttgccattctcttctttctggaa

SEQ ID NO: 1560 - DNA, 157 bp, Homo sapiens
  misc_feature 1, 2, 17, 18, 60, 86, 124: n = A,T,C or G
nnaaaagaaaaagaagnnaaaagatggaactgagaaagaaaaggatattaaaggactcancaaaaagagaaagatgtattctgaanataaacctttatcatctgagtccttgtcagaatcagantatattgaggaggtgcaagcaaaaaagaagaaa

SEQ ID NO: 1561 - DNA, 306 bp, Homo sapiens
ctgtttcagcaccttcgtctggctggtctctcggatttcgccagccaggaacatctcgtccacgaccgtgtaaaccttgtagaagttgaacaccaggtccagttcacagacattgtggaaatattcgtttaagacctccacgaagttgtgaatggcctccaggtaagccaggttgttgtcattgacatccacacagatgcagaagtagaggccagcatagcggcggtaaatgatcttaaagttccggaactccacaaagttggtgtgtttggcgtctcggacggtgaccacggcatgcacctcctc

SEQ ID NO: 1562 - DNA, 418 bp, Homo sapiens
  misc_feature 236: n = A,T,C or G
aaaagcttaaaacagaaacagccatttatttgctcatgattctgtaacttgggcagggcttggcagggtcagctagtctttgctgaggtaacttgactggggctaaagatgcaagatggcttcacccagcttctcagttgggggctggcgtggctggaagacagcaggcccttcccttttcctttagagtctctcatcctccagggcctcattttcttcaggtgctatctctctcntgcagcacaaacttctttacatcacagctgtgcctttggagctggacatccaggtacctggctgcctgctgggaacaggtgagtatgtatcagccattgtgaagcctcaaaaggctgcagcctgacgtagctgcagatcaggctgtacccaaattgcattgttactgatgaaataatttttt

SEQ ID NO: 1563 - DNA, 389 bp, Homo sapiens
ctgacccccctttgtccacagctaagatggcagcagaatgctatgtcactatatacagaaacaagacaacctgaagctaaatggatgccccctgcagagtcaacaggtccagcctcacagtgcacgccctgagctacagcctctcccaaaaggcatcttccccacagcctcaacgccgagcaaggagcatcaagggtttgtctcggttgttttgttctttttacaaactatagatatatacagttgaaaactcaggatttctagccaataaccatagttaccaccaccttacaaataaaaagaaaatgccagaaacatctttaaatgccttgtcacaccaacagcaaagtgcacagagtgaggagaacacgagagtgccttttcatttt

SEQ ID NO: 1564 - DNA, 200 bp, Homo sapiens
aaacatctcacatatacaaaataggtacaatttaatttttctgcttgcccaagaaacaaagcttctgtggaaccatggaagaagatgaaaatgagactggcaaagaacaaatgctgaatctgaagaagatttgggcaaataatctgcatacttttaattgggaataagatggaaaatatgaatgctaaatcaaatttttt

SEQ ID NO: 1565 - DNA, 514 bp, Homo sapiens
  misc_feature 415, 416, 432: n = A,T,C or G
aaatgaaggatttaccattaagaaatcaacatgtgcacaaaaagagtaaaaattaccaaaaaattaaagattttttgggacaattcacatgttcaaaatttaagaatgatttaaactgtgcaagtacaaatgtctttcctattataataacccatatacaggttgcactattccacatcaaggaacttgcctcctacggaagcaaatcctgcttttagaaaaacaaacagtagcttgaaaagaacagttagtccttacaagaaagtcttaaactttgccctctgtggctgttagccaaaaaaccataagcacttcaggctttgtacagaagacaaacacagccagatcacatttcctcctcattgctaacctttaaaataaaaatagcactagattttaaaactacttcatgtannctgtcagtactgaatnatgtcacattatataaataaccctgtaacgagattcaatatctaaactttatagtttactagctgcaaaggtaatacaccat

SEQ ID NO: 1566 - DNA, 508 bp, Homo sapiens
  misc_feature 418, 432, 503: n = A,T,C or G
ccatgagctgagttgtgacttctgggaactaattgggttggcccctgctggaggagctgacaacctgatcaatgaggagtctgacgttgatgtccagctcaacaacagacacatgatgatccgaggagaaaacatgtccaaaatcctaaaagcacgatccatggtcaccaggtgctttagagatcacttctttgatagggggtactatgaagttactcctccaacattagtgcaaacacaagtagaaggtggtgccacactcttcaagcttgactattttggggaagaggcatttttgactcaatcctctcagttgtacttggagacctgcctcccagccctgggagatgttttttgtattgctcagtcataccgggcagagcagtccagaacacgaaggcacctggctgagtacacntcacgtggaagctnagtgtcctttcctgacttttgacgacctcctgaaccggttggaggacttggtttgtgatgtggtagatcgnatatt

SEQ ID NO: 1567 - DNA, 153 bp, Homo sapiens
ccaagtcttcacaaacccttgcaacattgcctgaagtttatggaataagatgtattctcactcccttgatctcaagggcgtaactctggaagcacagcttgactacacgtcatttttaccaatgattttcaggtgacctgggctaagtcattt

SEQ ID NO: 1568 - DNA, 452 bp, Homo sapiens
gacctgcccgtgaagaggcgggcatgacacagcaagacgagaagaccctatggagctttaatttattaatgcaaacagtacctaacaaacccacaggtcctaaactaccaaacctgcattaaaaatttcggttggggcgacctcggagcagaacccaacctccgagcagtacatgctaagacttcaccagtcaaagcgaactactatactcaattgatccaataacttgaccaacggaacaagttaccctagggataacagcgcaatcctattctagagtccatatcaacaatagggtttacgacctcgatgttggatcaggacatcccaatggtgcagccgctattaaaggttcgtttgttcaacgattaaagtcctacgtgatctgagttcagaccggagtaatccaggtcggtttctatctacttcaaattcctccctgtacgaaagga

SEQ ID NO: 1569 - DNA, 479 bp, Homo sapiens
  misc_feature 438: n = A,T,C or G
ccagtgaaggcaccaacatcccaagtcctgtggtgcgccagattgacaagcagtttctgatttgcagtatatgcctggaacggtacaagaatcccaaggttctcccctgtctgcacactttctgtgagaggtgcctgcagaactacattcctgcccacagtttaaccctctcctgcccagtgtaccgccagacctccatcctgcccgagaaaggggtggccgcgctccagaacaatttcttcatcacaaacctgatggacgtgctgcagcgaactccaggcagcaacgctgaggagtcttccatcctggagacagtcactgctgtggctgcgggaaagcctctctcttgcccaaaccacgatgggaatgtgatggaattttactgccagtcctgtgagactgccatgtgtcgggagtgcacggagggggagcacgcanagcaccccacagttccactcaaggatgtggtggaacagcac

SEQ ID NO: 1570 - DNA, 505 bp, Homo sapiens
aaaataaagaggcgccaatacccgttcatttatgtattagaagtctcgtataatcaccaataaaacagaaatagcatctgtgatcacacaacggagaaaaaagatcaagagacaaccttagccactgtaaaactgtacttgaacactcagatgctctggctaagtcagaatctaaagatttgctaataaggttttattggtttagcatagtcccatggcctttgtctataactgatatgtggaaaccgttcccaaggaaatttaagaaaccattctgaaattctgcctttgatgtacattataattaaatgtgactgttataaacgttgcctctatcatattatcttttgtaaagtggaggcaaagagagacaaaaagcatcctcctggactgctgacatgcagaaagcatcagcaatgatagggttgtgacagcatttatggagtttctagggcaggggggacagaatgctgtatctcagcatctttggttaaggtctggcctc

SEQ ID NO: 1571 - DNA, 469 bp, Homo sapiens
ctgagtacaaggttatcactgtgatagaacctggactgctttttgagataatagagatgctgcagtctgaagagacttccagcacctctcagttgaatgaattaatgatggcttctgagtcaactttactggctcaggaaccacgagagatgactgcagatgtaatcgagcttaaagggaaattcctcatcaacttagaaggtggtgatattcgtgaagagtcttcctataaagtaattgtcatgccgactacgaaagaaaaatgcccccgttgttggaagtatacagcggagtcttcagatacactgtgtcctcgatgtgcagaagttgtcagtggaaaatagtattaacagctcactcgagcaagaaccctcctgacagtactggctagaagtttggatggattatttacaatataggaaagaaagccaagatttaggtaatgagtggatgagtaaatggtggagga

SEQ ID NO: 1572 - DNA, 361 bp, Homo sapiens
ccacaaacacctctcggcggccaggctgtttcagtcgaccacggcacacttccccaaattcccctgcagggcacagggcacaagctatgactcactcctgtacccagcccgcctcagcttctcatctctactgtgccccgggagactcaccagctccgatcacctcctcgatcttgacgcaggacacgtcgatctccttggcaaactcccgaacagcctcattagggtcctcgtaggtaaaagggtcaatataaaccttcattccaggagcaactggagggagaagaggtgggcgtgagagggtaacgtcaagccagcctctccctgcgatgggcacagctccagcaggctccctgctgag

SEQ ID NO: 1573 - DNA, 295 bp, Homo sapiens
  misc_feature 202, 208, 232, 234, 273: n = A,T,C or G
ttgtacaagcttttttttttttttttttttttttttttatctcatgcgttccatttattttgtctctcaaattttaggaatcttctcctttaattaactcatcaacctctcatggcaagaatttgagaaagtaaatttatactcaggttctaattttaatagggaaggaagaagttacagctcagtgcaccatgaagttganacaganatggagacacctcagccccacctntntggaacaggaaagatgattggggagggagcacaggtcancgtgggaagagggtcatggtgg

SEQ ID NO: 1574 - DNA, 547 bp, Homo sapiens
  misc_feature 473: n = A,T,C or G
cgacattccagaaaatgtcgacattactctgaagggacgcacagttatcgtggagggccccagaggaaccctgcggagggacttcaatcacatcaatgtagaactcagccttcttggaaagaaaaaaaagaggctccgggttgacaaatggtggggtaacagaaaggaactggctaccgttcggactatttgtagtcatgtacagaacatgatcaagggtgttacactgggcttccgttacaagatgaggtctgtgtatgctcacttccccatcaacgttgttatccaggagaatgggtctcttgttgaaatccgaaatttcttgggtgaaaaatacatccgcagggttcggatgagaccaggtgttgcttgttcagtatctcaagcccagaaagatgaattaatccttgaaggaaatgacattgagcttgtttcaaattcagcggctttgattcagcaagccacaacagttnaaaacaaggatatcaggaaatttttggatggtatctatgtctctgaaaaaggaactgttcagcaggctgatgaa

SEQ ID NO: 1575 - DNA, 375 bp, Homo sapiens
ccacatcatgtcacttacacccacaacagctctgaaaggagtatttgatgaacacatctgagccaagagcccagagtctctctccaaggccatgcagtttgttcactgatgggacagtccctcaaaacagccacgctaagtagacagatacagtctccccaaatgttaccaatcttactccccttgaaaacaggcagagtgaagtgcaatgaaagacaagttaattaaaaagccactcacaactggcagtaaattttaatgattgataaaatgcttaaaataattttatgtatcagaaacaaggaacagcttgttactttttcaatgatctcaggaattttgcagacacaaaatctccattattcagctccattt

SEQ ID NO: 1576 - DNA, 440 bp, Homo sapiens
ccaatgcagcagggacatctgcctgggaaggaagttaggatgccccataggtcaccagcaccaccatcatgaacagggacagtaactccagccctggccgaaatgaaatccacatggaaatccaaatgcaagacccacagtaccaagatttggatcatgtattgatcccagattcctcaaatgaagactgggctgtcaggcatgtgtatcccaaatatatgctatgtcatgccctgccccaagtgatgtagagtagacttttccaagccccaaagatttgtcaagttactcatttcatcatccctcgaggtaccttatgaatacctttttttttcttttttttgagatgaagtctcgctctgtcgcccaggctggagtgcagtggcgtgatctcggctcactgcaacctccgtctcccgggttcgcgccattctcctgcc

SEQ ID NO: 1577 - DNA, 474 bp, Homo sapiens
ctgctggaatcatataggtcattaacccttggctatatggcagaagcgtttggtgttggtgtggaattcattgatcaggaactgtccaggtttattgctgccgggagactacactgcaaaatagataaagtgaatgaaatagtagaaaccaacagacctgatagcaagaactggcagtaccaagaaactatcaagaaaggagatctgctactaaacagagttcaaaaactttccagagtaattaatatgtaaagccatgtaactaacaaaggatttgctttagagataattatttggaatttttatagcttacttcacaatgtgcccaggtcagtggaatttattattttaacctctgaaaacactgaccaaatcaagcctcatatttttaagtgctacatataaccttcaccagtgtgatttacataaatatttcctatgttatagatcatgaaaatataaaaataagctagg

SEQ ID NO: 1578 - DNA, 374 bp, Homo sapiens
aaagaagagaaaaacaccttgagccttaaaacggtgctgctgggaaacatttgcactcttttagtgcatttcctcctgcctttgcttgttcactgcagtcttaagaaagaggtaaaaggcaagcaaaggagatgaaatctgttctgggaatgtttcagcagccaataagtgcccgagcacactgcccccggttgcctgcctgggccccatgtggaaggcagatgcctgctcgctctgtcacctgtgcctctcagaacaccagcagttaaccttcaagacattccacttgctaaaattatttattttgtaaggagaggttttaattaaaacaaaaaaaaattctttttttttttttttccaattttaccttcttt

SEQ ID NO: 1579 - DNA, 397 bp, Homo sapiens
aaaaatctcatccttggctaggcacggtggctcacatctgtaatcccatcactttgggaggccaaggcaggcggatcaagaggtcaggagtttgagaccagcccgaccaacatggtgaaaccctgtctctactaaaaacacaaaaattagccaggcatggtggcacgcacccgcaatcccagctactcaggagactgaggcaggagaatggcttgaacccgggaggcggaggttacagtgagccaagatcataccactgcactccagcctgggtgacagagcgagactccgtctcaaagaaaaaataaaaataaaaaaactgaaaaggccaggtgtggtggctcatgcctataatcccagcactttgggaggccgaggtgggtggatcattttgagc

SEQ ID NO: 1580 - DNA, 529 bp, Homo sapiens
  misc_feature 490, 511: n = A,T,C or G
aaacattgcaaattgaccagctagctatggaagcataaaattaattgataattaatgttggaaatacatttctaaaatttatatttttatggtgttagcctgtaagagcattttagcatattgaaatgcatgctgcttaagatgtgtctggttcaaatatcaaaacttgctgggtcatttttacatagtagaaacatactgtctatgtgttgcccaattactgtttgtccactctgaattctggaccctttttggactaagaattagttaaattcatgaactaagagaattagagatggggtagagtaggatcaggacagtggggttacaacagataggaaaggaaagtcagcatttgagtgtagagaaaaaaaggggatcatacagatgtcatcaaattataggctttaatacaggttgctttttttaatccaaaaggaaaagcacttatcctatcagaatgtctaccatgttttatagtaataatttntgtaaaaaattgaatttttgnatagttttttgtattttt

SEQ ID NO: 1581 - DNA, 393 bp, Homo sapiens
gcgcctctccgaacgcaacatgaaggtgctccttgccgccgccctcatcgcggggtccgtcttcttcctgctgctgccgggaccttctgcggccgatgagaagaagaaggggcccaaagtcaccgtcaaggtgtattttgacctacgaattggagatgaagatgtaggccgggtgatctttggtctcttcggaaagactgttccaaaaacagtggataattttgtggccttagctacaggagagaaaggatttggctacaaaaacagcaaattccatcgtgtaatcaaggacttcatgatccagggcggagacttcaccaggggagatggcacaggaggaaagagcatctacggtgagcgcttccccgatgagaacttcaaactgaagcacta

SEQ ID NO: 1582 - DNA, 317 bp, Homo sapiens
ctgtgatgtcttggagaaacagtgtaaaccggcagtgtaaagaagagcagggcatgtatgagtagttgagaacggtgaacgggagtatgactaacagatgaggatgaaatttgggcttcactgaagtaatgggggctgtctgtgaagccttgtggcagtgcagcccaggtaatttgttgagcctaatgggtgtcagggtcagtctaagtgaaggcaaagagaggctgggatgaagggtgcaaagcaatagtaaagaaagcatgtctgagatccagaacagaataatgggtagtagagggaggtattgaggataggag

SEQ ID NO: 1583 - DNA, 272 bp, Homo sapiens
  misc_feature 174: n = A,T,C or G
ccacatcggcagggtcggagccctggccgccatactcgaactggaatccatcggtcatgctctcgccgaaccagacatgcctcttgtccttggggttcttgctgatgtaccagttcttctgggccacactgggctgagtggggtacacgcaggtctcaccagtctccatgttgnagaagactttgatggcatccaggttgcagccttggttggggtcaatccagtactctccactcttccagtcagagtggcacatcttgaggtcacggcag

SEQ ID NO: 1584 - DNA, 250 bp, Homo sapiens
ctgcaggtagacgtgatctttctcagggccacagcctcttccttctcggatctccagagtcatggaccgagacaccacatctctagacgccaggtccttcgcgacaggggcgtatcgctccataaacctttcgccttgactgttaatgagaatgcctccctctccacgacatccttccgtaatgagacaaccagcaccatatatgcctgtggggtggaactgaacaaactctaggtcctggcaaggaagg

SEQ ID NO: 1585 - DNA, 428 bp, Homo sapiens
aaaaacaaaaggttgatatactataaaataagatgcttcagtgcagctccaaaaacctttataaatacagccatttggaaggacgatcctggatcagaaattattccttgtgtatctatattatgtgcatgtctcatttcagttgtcataattgtctctgtaatttcctcctgagtagcggtcataaccaccctggtttctgccattatagtctctggaacgtccatatccatatccataccctccaggtcgactgtcataatacctgccactcccatagccctggtccccaccacctctagagtagctgcgaccacgcccatgggccccaaagccacctcctctggttccccgagcagacttgcctgcatgatccacacggatctgacgaccatccagagactctccgttcatggctctcatggcaa

SEQ ID NO: 1586 - DNA, 265 bp, Homo sapiens
aaaagatccaggtggaaatatttttactatagtaataattctacaaaatacctgaattcttaacactgttatatttcagtataagtggtggctttttcttttcatgtctttgatctggttttattcctgtaattcagccacctgattttgtgaggggggggaataatatgtggtttttgtacaaacatgtttctcagtgtgttgttattttggaaaaaatgaggggagggagtttggcaagaatggagaaaatgaatgaagaagg

SEQ ID NO: 1587 - DNA, 345 bp, Homo sapiens
ctgcccttgtctaggaaggctcatgctttgcttcaatgaagcgaggagaccacagaaatacccatggctgtggggctgtgaccagcagtggctgattagggtggaaactggaaagcgtcactgtctcagcagaagaaagcaggaccccacacagcctggggaacggctgcccacccacgcctcggtgaagaccacggccctggcgaggccccaaggtgcttctgagagatgaacgagacacctcagtcatggcacactgggtggtgtgcttcccctccaagtcctgtctttgttttacacagtcatatgaaagacataaccccattgcccaaatcaagcctggag

SEQ ID NO: 1588 - DNA, 441 bp, Homo sapiens
gaggaaggtggcaagatggtgttggaaagcactatggtgtgtgtggacaacagtgagtatatgcggaatggagacttcttacccaccaggctgcaggcccagcaggatgctgtcaacatagtttgtcattcaaagacccgcagcaaccctgagaacaacgtgggccttatcacactggctaatgactgtgaagtgctgaccacactcaccccagacactggccgtatcctgtccaagctacatactgtccaacccaagggcaagatcaccttctgcacgggcatccgcgtggcccatctggctctgaagcaccgacaaggcaagaatcacaagatgcgcatcattgcctttgtgggaagcccagtggaggacaatgagaaggatctggtgaaactggctaaacgcctcaagaaggagaaagtaaatgttgacattatcaat

SEQ ID NO: 1589 - DNA, 438 bp, Homo sapiens
ccagtttgtgcagttccagtagtgactgattcacatttttttccaaatgtaatgcacactccattgcattcagcccgctctcccagtcatcacagtctggtttcttgatatcctgaaggaagattcggccacctcgttggttctgcagcttcatcagtttctcagcatgttccctctcctcatgagattggtgaagaaagtatttggcaaagttcttcaaagccacatcatcgcggtcaaagtagtaagactgaaaggggaacactgaatgtgttatactagggatccccagagacaggtagctgtgacgatctacagggaggcaagatggtctcgtcagcctaggcttcctttctcaaagcacagcatgaaggaatcagtgcctaaggagactggggggcagatgagctactggattgaacccaagagtaatgtttc

SEQ ID NO: 1590 - DNA, 446 bp, Homo sapiens
gccgccgcttgtgctgcagccatgtctctagtgatccctgaaaagttccagcatattttgcgagtactcaacaccaacatcgatgggcggcggaaaatagcctttgccatcactgccattaagggtgtgggccgaagatatgctcatgtggtgttgaggaaagcagacattgaccccaccaagagggcgggagaactcactgaggatgaggtggaacgtgtgatcaccattatgcagaatccacgccagtacaagatcccagactggttcttgaacagacagaaggatgtaaaggatggaaaatacagccaggtcctagccaatggtctggacaacaagctccgtgaagacctggagcgactgaagaagattcgggcccatagagggctgcgtcacttctggggccttcgtgtccgaggccagcacaccaagaccactggccgccg

SEQ ID NO: 1591 - DNA, 131 bp, Homo sapiens
  misc_feature 10, 11, 18, 37, 42, 68, 81, 87: n = A,T,C or G
ccagcggccnnccgggcnggtccacttccatgccctntccanaccaggagacacctgctgctgacctngtggaaaacttanattttnacattctgatgcttcggaagtggtggctcctcctccctcacccc

SEQ ID NO: 1592 - DNA, 510 bp, Homo sapiens
  misc_feature 502: n = A,T,C or G
cgacgaaggagtaggtggtgggatctcaccgtgggtccgattagccttttctctgccttgcttgcttgagcttcagcggaattcgaaatggctggcggtaaggctggaaaggactccggaaaggccaagacaaaggcggtttcccgctcgcagagagccggcttgcagttcccagtgggccgtattcatcgacacctaaaatctaggacgaccagtcatggacgtgtgggcgcgactgccgctgtgcacagcgcagccatcctggagtacctcaccgcagaggtacttgaactggcaggaaatgcatcaaaagacttaaaggtaaagcgtattacccctcgtcacttgcaacttgctattcgtggagatgaagaattggattctctcatcaaggctacaattgctggtggtggtgtcattccacacatccacaaatctctgattgggaagaaaggacaacagaagactgtctaaaggatgcctggattccttgttatctcangactctaa

SEQ ID NO: 1593 - DNA, 554 bp, Homo sapiens
aaactttataattactttaatatttttgataactagaaatctagtattgccataaaggaaactaagtgcccatcaaagatttgtttggtataaataaagaattatttgttttgttttcaatgacagtaagctacaaatcatgatgcttaaaaactttctaaagatgaattgtgtggcagtgattggtctgtttgtggagaatgtatgaaagctattaatattctagaatagattaataaattggctatgttgttccaatgaatgtacagcacttccattaacttttgaaagcaacacagccttaaactcaatgcttttgctttatgacatgggaatgttctgtcatcaatggagtgtattcttgtaatagaattctttatatcgttctcaattctatagactttcaagcctatgtatgaatatgaaggggtttttttttttgctttgttttctttttagattttgtacattccatctttataggtccgtttcatatgttttatgtatagaacactaagtcttgcactctctgacattgatactgatatattctc

SEQ ID NO: 1594 - DNA, 518 bp, Homo sapiens
cctgctgggagaagagaacatgaatgggaagctacagaagtattgaaggacagaagaacaggaaaatgggcaggagaggaaaggaaaggaaaggaagagaaggtctgaacttagcaaggtaaattaaggtccacggttcctgagggactgaacgcacagagccgagaacgtcccggagatggggtaccacgaagggtgtattctcatgcacaaccgcagctcggaatttcagcccacacacatcccaccttgaaactctgtgttatcaaggcccctgatggcctccactgcatcctctgcccgctccatgtgtacgaaggcataatctttcacgatgtcacattcgatgaccggaccatactcctcaaacttggctcgaagctccttattggtgcaggtgggactgatgttgcccacatgcaactttgttgaggttttgctcttattcttgctggcttccacgttgatgttcaccccatgaagcttgtaatggtgcaggttgcgtatggcatcctcag

SEQ ID NO: 1595 - DNA, 500 bp, Homo sapiens
ccagtaaaatactattgcctcatattgtcctctgcaagcttcttgctgatcagagttcctcctacttacaacccagggtgtgaacatgttctccattttcaagctggaagaagtgagcagtgttggagtgaggacctgtaaggcaggcccattcagagctatggtgcttgctggtgcctgccaccttcaagttctggacctgggcatgacatcctttcttttaatgatgccatggcaacttagagattgcatttttattaaagcatttcctaccagcaaagcaaatgttgggaaagtatttactttttcggtttcaaagtgatagaaaagtgtggcttgggcattgaaagaggtaaaattctctagatttattagtcctaattcaatcctacttttcgaacaccaaaaatgatgcacatcaatgtattttatcttattttctcaatctcctctctctttcctccacccataataagagaatgttcctactcacacttcag

SEQ ID NO: 1596 - DNA, 234 bp, Homo sapiens
ccatccgcttcctgaatgctgagaatgcacagaaattcaaaacaaagtttgaagaatgcaggaaagagatcgaagagagagaaaagaaaggatcaggcaaaaacaatcatgccgaaaaagtggcagaaaagcttgaaggtctctcagtgaaggaggagaccaaggaggatgctgaggagaaacaataaatcgtcttattttatttccttttcctctctttcctttccttttttt

SEQ ID NO: 1597 - DNA, 419 bp, Homo sapiens
ccaaccttcctgtgcccagcctgcagacaggtggcctctggtggttccaggatctcacggtatccgatcccatctacatattaccactggcagtcactgctacaatgtgggctgttcttgagctaggtgctgagacaggtgtgcaaagttctgaccttcagtggatgagaaatgtcatcagaatgatgcccctgataaccttgcccataaccatgcatttccccacggcagtgtttatgtactggctctcctccaatttgttttccctggtccaagtatcctgtctccggattccagcagtacgcactgtacttaaaatcccccagcgtgttgtacatgacctggacaaattacctccacgggaaggcttcctagagagcttcaaaaaaggctggaaaaatgctgaaatgacgcgtcag

SEQ ID NO: 1598 - DNA, 291 bp, Homo sapiens
ccaattgatttgatggtaagggagggatcgttgacctcgtctgttatgtaaaggatgcgtagggatgggagggcgatgaggactaggatgatggcgggcaggatagttcagacggtttctatttcctgagcgtctgagatgttagtattagttagttttgttgtgagtgttaggaaaagggcatacaggactaggaagcagataaggaaaatgattatgagggcgtgatcatgaaaggtgataagctcttctatgataggggaagtagcgtcttgtagacctacttgcgct

SEQ ID NO: 1599 - DNA, 290 bp, Homo sapiens
aaacctttttggcttaaacagaattttagcatcagaactagctttctgggattggaggcaaaccatcaaggtggtccctctccagtctggacacgatgccagcaaggatgacgtcctgccacctcctggagttaccctggcctcctagggtccctttttctgatgaagtcttaattccctaaaagcgcctctttggacactgaggccctctctgcctttcctggcctccggcaacagttttttacaaagattttttgcagtcgagtccatatgtccacccattgattttt

SEQ ID NO: 1600 - DNA, 294 bp, Homo sapiens
attaagttcaatgtatgggacacagccggccaggagaaattcggtggactgagagatggctattatatccaagcccagtgtgccatcataatgtctgatgtaacatcgagagttacttacaagaatgtgcctaactggcatagagatctggtacgagtgtgtgaaaacatccccattgtgttgtgtggcaacaaagtggatattaaggacaggaaagtgaaggcgaaatccattgtcttccaccgaaagaagaatcttcagtactacgacatttctgccaaaagtaactacaac

SEQ ID NO: 1601 - DNA, 435 bp, Homo sapiens
  misc_feature 171, 180, 197, 215, 376, 404, 420: n = A,T,C or G
ttttttttttttttttttgtttttttttttttaattcttcagctaaaacagcggaagaggtgatttattatatggttgttacactcggccacaaataaacacagaaatagtccagaatgtcacaggtccagggcagaggaccaacatgggcattttgtttatgagcaaggngggtctcanaggtgatcggcgatcanagggcgatgaagttctanatccattgagacaagctctagacagtagcatgcagtcccacaacttgtaccagcatccccagcgtctggcattccatgtttctgctcctgtggcctccacggtgcaacaagctagcggtttacttggacctctgcctcatctttcttcttttgcgcttcancctgcgcattcgcttcttcctccacttngctctcatggcggcanaggtttccaaaaaaa

SEQ ID NO: 1602 - DNA, 319 bp, Homo sapiens
gacgctctcagctctcggcgcacggcccagcttccttcaaaatgtctactgttcacgaaatcctgtgcaagctcagcttggagggtgatcactctacacccccaagtgcatatgggtctgtcaaagcctatactaactttgatgctgagcgggatgctttgaacattgaaacagccatcaagaccaaaggtgtggatgaggtcaccattgtcaacattttgaccaaccgcagcaatgcacagagacaggatattgccttcgcctaccagagaaggaccaaaaaggaacttgcatcagcactgaagtcagccttatctgg

SEQ ID NO: 1603 - DNA, 309 bp, Homo sapiens
ctgcctgggcccggaagggctttggttccttctctgggtctgattttctcactgaactccaccgaccaactgccctaagcccccagggcctccagggcccaggttcgagacccaaacccccaaaatccaaaacttctcttgaaaagttcagggaccgtccaggggagatggggaggagatatggagtgagtcacctgctccagaagatgccagcttctctctccagggtgcttagttggctttgcccacccctcactccccagggagctctggggacagcttcctcacacccctgtcccacccacacag

SEQ ID NO: 1604 - DNA, 424 bp, Homo sapiens
ctggataaggacatcaataccttctctatgcgtgtcagggagtggtacgggtatcactttccggagctggtgaagatcatcaacgacaatgccacatactgccgtcttgcccagtttattggaaaccgaagggaactgaatgaggacaagctggagaagctggaggagctgacaatggatggggccaaggctaaggctattctggatgcctcacggtcctccatgggcatggacatatctgccattgacttgataaacatcgagagcttctccagtcgtgtggtgtctttatctgaataccgccagagcctacacacttacctgcgctccaagatgagccaagtagcccccagcctgtcagccctaattggggaagcggtaggtgcacgtctcatcgcacatgctggcagcctcaccaacctgg

SEQ ID NO: 1605 - DNA, 484 bp, Homo sapiens
  misc_feature 430: n = A,T,C or G
ctggatgtgagagacaacatggtgaaacttaatgatggctctcaaataacctatgaaaagtgcttgattgcaacaggaggtactccaagaagtctgtctgccattgatagggctggagcagaggtgaagagtagaacaacgcttttcagaaagattggagactttagaagcttggagaagatttcacgggaagtcaaatcaattacgattatcggtgggggcttccttggtagcgaactggcctgtgctcttggcagaaaggctcgagccttgggcacagaagtgattcaactcttccccgagaaaggaaatatgggaaagatcctccccgaatacctcagcaactggaccatggaaaaagtcagacgagagggggttaaggtgatgcccaatgctattgtgcaatccgttggagtcagcagtggcaagntacttatcaagctgaaagacggcaggaaggtagaaactgaccacatagtggcag

SEQ ID NO: 1606 - DNA, 273 bp, Homo sapiens
ctgtgatgtcttggagaaacagtgtaaaccggcagtgtaaagaagagcagggcatgtatgagtagttgagaacggtgaacgggagtatgactaacagatgaggatgaaatttgggcttcactgaagtaatgggggctgtctgtgaagccttgtggcagtgcagcccaggtaatttgttgagcctaatgggtgtcagggtcagtctaagtgaaggcaaagagaggctgggatgaagggtgcaaagcaatagtaaagaaagcatgtctgagatcc

SEQ ID NO: 1607 - DNA, 400 bp, Homo sapiens
cacaaagccagggccaggctccccatccctacctcccactgcatcagcagtgggtgttcctgcccttcctgagtctaggcagctctgctgctgtgatctgcacaccctccaacctaggcagggactggggggatgcagtgtgtgttagtgcccatgtggcattgtggcactgttgccccccatggcggcatgggcaagatgaccttccattagcttcaagtcttgttctcttgtctgtggtctgtttaatatgtgggtcactagggtatttattctttctcccatccttacactctggatcattgtgcagacttaatcagggttttaacgctttcattttttttttttttgagctcaaagagagttctcattttccctattcaaactaatacccatgccg

SEQ ID NO: 1608 - DNA, 279 bp, Homo sapiens; identical to SEQ ID NO: 1082

SEQ ID NO: 1609 - DNA, 368 bp, Homo sapiens
gttttatttcaataggtaaaacgtgcagtcctatgtaatcgtcagaaggtaatcttaattatagcttgggtgtgctttaaactgcaagctggcagtggagggcacgattcctctgatttcagctttctccttatacttttctggagctgtgagctgcaagttaactcagtgggattaaagtgtagactggaggtacaaaaggtgaggagtgaggagatagggtagttcttccttggctggctggcttcataatccctgggccccgcagataattaaatcgactttttctgtctcaggcatttgtatgacctctttggaggttccctgctgggtagttatccttgtatctgatggacccatctcaattt

SEQ ID NO: 1610 - DNA, 207 bp, Homo sapiens
ccatgctggtctcgaactcctgaccacatgtggtccacccaccttggcctcaattatgtgcattttggtatatttacttgtatttcaacatcttgtgagtttgaaaaacctgaaaggccagaatgcttccttttatttctcaccatttgggcagcacctaagtggttttgtaaaatgcagcatctggtgctgtgggtctctctcagg

SEQ ID NO: 1611 - DNA, 460 bp, Homo sapiens
  misc_feature 427: n = A,T,C or G
cctgacattcctgccttcttatattaataagacaaataaaacaaaatagtgttgaagtgttggggcagcgaaaatttttggggggtggtatggagagataatgggcgatgtttctcagggctgcttcaagcgggattaggggcggcgtgggagcctagagtgggagagattaagctgaagggaggtcttgtggtaaggggtgatatcatggggatgttagaagaaacatttgtcgtatagaatgattggtgatggcctggatacggttttggatgatttgagaagctaaatggaagatacaaggtccgaataaaaggaggagaaaaatgggtattaaatgtctaagaattgggaggacctaggacatctgattagagagtgcctaaggagattcagcatagtcctgccagcaaagattatttacttnaagagttaagagtggcagtttggggatagcacc

SEQ ID NO: 1612 - DNA, 133 bp, Homo sapiens
aaaatgtgaaccttcaggtattgagtaacacctttatcttggtatagaactgatacttttttttgattttgaaatatctgataataatttggaatgaagtaaggttctgttaaaatatatttgaagacccttt

SEQ ID NO: 1613 - DNA, 524 bp, Homo sapiens
cctagcagagaatcaccaaatttatggagagttaacaggggtttaacaggaaggaagtgcctttagtaagttctcaagccagaggctggaggcagcagctaaatcagaggacagcatcctcagtgaaagtgagccattcggggtggcatgtcactccaggaataaacacaacttagaaacaaatgatttcgtaggatagcacagtgacatggtgcactgtgaacctgaggccactgtgtcaaactgtgcactggttgtgaatagggagagccaaaaattatgtcctactggtaatgagctttcaatggctcgatcctctcacactgaagctctgtagagcagctcagagccacaaccactcccaacattgacccttctgggggtagctgtctgtggcagcccacaggaaggagctggagatccccattaggactgtccacccacacttgaagccacaaaactgcagggattggggctctcactggtttggtcgcctaactcccgcctaaaaggccacaaatttc

SEQ ID NO: 1614 - DNA, 410 bp, Homo sapiens
  misc_feature 381, 391: n = A,T,C or G
ctggataaggacatcaataccttctctatgcgtgtcagggagtggtacgggtatcactttccggagctggtgaagatcatcaacgacaatgccacatactgccgtcttgcccagtttattggaaaccgaagggaactgaatgaggacaagctggagaagctggaggagctgacaatggatggggccaaggctaaggctattctggatgcctcacggtcctccatgggcatggacatatctgccattgacttgataaacatcgagagcttctccagtcgtgtggtgtctttatctgaataccgccagagcctacacacttacctgcgctccaagatgagccaagtagcccccagcctgtcagccctaattggggaagcggtnggtgcacgtnttatcgcacatgctggcag

SEQ ID NO: 1615 - DNA, 107 bp, Homo sapiens
ctgttgtgaaaagatgaagcaaaggaggcaagaaaatgcttaatttagcagacaagagaatggacagtgtgatccttgtttgtgctagccattgggtgatgcaccac

SEQ ID NO: 1616 - DNA, 457 bp, Homo sapiens
  misc_feature 6, 129, 133, 221, 255, 346, 389: n = A,T,C or G
aaattnttgtttaactttttttttttttgagacagagtctcactctgttgcctaggctggaggacagtggcacaatcatggctgattgcagccttgacctccttgactcaattgatcctcccatctcancctnccaagtagctagggctacagacatgtgcaaccatgtttggctaatttttttaatgtttttttgtagagatgaggtcttattatattgnccaggctggtcttgaattcctgggctcaagcttnccaagtagctgcaacaacaggcacacaccaccatgctcaactaattttatttctattttttgtatagacaggggcttgctatagtgtccangctggtctgaaacccttgagctcaagtgatcttcccacaccancctcccaaaatactgggattacaggcttgagcctccatgcctggcccaggtaacatgtttattgagct

SEQ ID NO: 1617 - DNA, 327 bp, Homo sapiens
aaacattagaaagtgggaaaaaaaattccattttcttgtcattataagccaaaacaaaatctagtgtaagtcaaggaaactcattcacacttcaggtccttctcctccaggaaccagcattgttatattatttccatttagcaaaatctgatctaatttagtaatccttcttccttctggtgtgatttcaaactcagtgacatcttccagtaccatattgacaaagtcatcaaatcctagaagagtaccaacaatttccttatcactcttcatcacgatgtgaattcttgatcctatacatttgtccacaagctctaacggcagcag

SEQ ID NO: 1618 - DNA, 167 bp, Homo sapiens
ctgagccaggccgaaggacctccatgcactggctcgggggcctctctcgggacactcagcactttctctagcgtcctccatctcactgggcagaggacagcccggaagcctttttcactttttcaaagtaaactgctatcttaagacacaaaaacatacttgtgggg

SEQ ID NO: 1619 - DNA, 498 bp, Homo sapiens
  misc_feature 480: n = A,T,C or G
ccaggcacgatctcggctcatggcaacctctgcctcccgggttcaagcgattctcctgtctcagcctcccgagtagctgggactacaggcgcccaccaccacacccagctaaattttgtatttttagtagagatggggtttcaccatattggtcaggctggtctcgaactcctgatctcaggtgatccgcccaccttggcctcccaaagtgctgggatgacaggcgtaagccaccaagcccagcgaagactgcatttcaaaattgctctacaattaaagaaatgcactgatagtcttaaaaaatgaagttgggggaaacccagtgtgcctaaaagtaccatctatactgctgacaccatgtcctgttccattttactagtttttattggcgcacactggcaatttagtcccagtcagttaccaccaaattagtatttcttggtatattatctttttttttcttttttttttttttctganacacagtcttgcacctgc

SEQ ID NO: 1620 - DNA, 305 bp, Homo sapiens
  misc_feature 192: n = A,T,C or G
cctgctagaatcactgccgctgtgctttcgtggaaatgacagttccttgttttttttgtttctgtttttgttttacattagtcattggaccacagccattcaggaactaccccctgccccacaaagaaatgaacagttgtagggagacccagcagcacctttcctccacacaccttcattttgaagttcggntttttgtgttaagttaatctgtacattctgtttgccattgttacttgtactatacatctgtatatagtgtacggcaaaagagtattaatccactatctctagtgcttgacttt

SEQ ID NO: 1621 - DNA, 354 bp, Homo sapiens
ccacccgttctgctggcctggatctccccactctaggggtcaggctccattaggatttgccccttcccatctcttcctacccaaccactcaaattaatctttctttacctgagaccagttgggagcactggagtgcagggaggagaggggaagggccagtctgggctgccgggttctagtctcctttgcactgagggccacactattaccatgagaagagggcctgtgggagcctgcaaactcactgctcaagaagacatggagactcctgccctgttgtgtatagatgcaagatatttatatatatttttggttgtcaatattaaatacagacactaagttatagcaaaaaaa

SEQ ID NO: 1622 - DNA, 498 bp, Homo sapiens
ttgccttgcactgtggttaccataaaataactctcattggcatccaagctttataaaaacatcttcattttgctcaaaaagggcagtcaatagatacagagaagccaaactgaacagcctcaataaaataaaattaacaccagcagcgaatcctcttgctgaagacttcggctagagggcacgtgcaccaaagttctaggctgttaaggggccacccacacaccgtcctcgccttgaacacaccagcttggaaatcagttatggattttaatggccttttcaaggtaagtgtagcgactcctctttggggctttgttgaagtggtcgagccctagccaaggccgaggatgagacatattaccgggctgtggctcaaagtctttcaaatttacttcatactcgtcttcatttatgtactggtgtcggcccatcattacaattgcaaatttaaacttctcaaactccttctcctggatgtccagcaggctctggattcgc

SEQ ID NO: 1623 - DNA, 197 bp, Homo sapiens
ccaaggaccgcaagagccgcaagaagcctgtggaggtgaagaagggcaaagaccccaatgcccccaagaggcccatgtctgcatacatgctgtggctcaatgccagccgagagaagatcaagtcagaccatcctggcatcagcatcacggatctttccaagaaggcaggcgagatctggaagggaatgtccaaagag

SEQ ID NO: 1624 - DNA, 489 bp, Homo sapiens
aaaaaaaggcccccagggcaagttatttacagtttaattgccactgtcaactgatctggaccttgatcgggaccgggacctctggcgatccacagatgctggagacttagatctacttgaagaaccacgtttctggctcttctcaggcacgggagacctactaacagaacgggacttgctccggctccggctcctgctcctgcttcttgaccggctgtaagatttgcgactacgggaacgggatcggctacgagacctagaggaacttctggtccgggatcgagacctgcttcttgacctactgtgccttttgctgccttcaattaattttatttttctcccatttatttcctttccagaaagtttttcaatagcattctttaagtcaccataagaggcaaactcaaccaccccttcatttaatttaggtcggtgtgcatccgcaaacgttacttccccagcttgtctcatgaaatctttgagatcctt

SEQ ID NO: 1625 - DNA, 129 bp, Homo sapiens
aaaaaacacgtttgttattaccaaaaagagacgtctttaggtaaaaataataaaaaccccatgctgcatagataatgcagatagttctatttatctggtcaacgggcaaaaagcaagcactttaggtct

SEQ ID NO: 1626 - DNA, 434 bp, Homo sapiens
aaagaaatggtgctttgctctgtgtttgtgctcctgatttccctggaggttctggatgaaggctgaacacaggcttgttaatgtcagtctgtgctgaggacctcagggacttgaggttgcatttttgagcatggggtgcaggagcctttctggatttggatgtggctatggaaagaacacagaagccaaggtcatgtgcatgaaatgaggagtttgagttagtcacctcggggattttttccattttgcagtaaaatgttaaattaatgtagcctgcctctatttgttgggcaggtaatttcaaagggttatttgcctcatctcctatctttagtgaaatcttatgtgtaattgtgtgtatttattccaccgtgggaacagagaatacctgtttagtgttgcactttagactggtgtctgttttgttaatgcag

SEQ ID NO: 1627 - DNA, 432 bp, Homo sapiens
ccaccctcagggttcaaagagactggcccaggggtacacaattgctggaatattctctgcgagtcatgcacacgtgcgggggtgaggtgcagttatatggtgacacacacagtgttactgtgagctctcagggtgcacagagggcaggtgacaagggcatcagctaatctgtcccacctggtccagcccatccagttcaggggcatcaagggggctgaggccccggtagccactgtagaccctgtgactatcactgacaccgtcactgggctccattgggcaaatgtagtccgtcgattcatcgaacttcttttttcttatgtttccgaagtgtgaaaatcctagtttccttggccggactttggctgtggtggtcagtggtgtgtaagctggtgaggccattttctctcgcttttcctgttcagcctccgg

SEQ ID NO: 1628 - DNA, 421 bp, Homo sapiens
ccaattgaaacaaacagttctgagaccgttcttccaccactgattaagagtggggtggcaggtattagggataatattcatttagccttctgagctttctgggcagacttggtgaccttgccagctccagcagccttcttgtccactgctttgatgacacccaccgcaactgtctgtctcatatcacgaacagcaaagcgacccaaaggtggatagtctgagaagctctcaacacacatgggcttgccaggaaccatatcaacaatggcagcatcaccagacttcaagaatttagggccatcttccagctttttaccagaacggcgatcaatcttttccttcagctcagcaaacttgcatgcaatgtgagccgtgtggcaatccaatacaggggcatagccggcgcttatttggcctggat

SEQ ID NO: 1629 - DNA, 462 bp, Homo sapiens
aggatctttgatagttgagaaaattatgcaaagttcctcagaagttggttatgatgctatggctggagattttgtgaatatggtggaaaaaggaatcattgacccaacaaaggttgtgagaactgctttattggatgctgctggtgtggcctctctgttaactacagcagaagttgtagtcacagaaattcctaaagaagagaaggaccctggaatgggtgcaatgggtggaatgggaggtggtatgggaggtggcatgttctaactcctagactagtgctttacctttattaatgaactgtgacaggaagcccaaggcagtgttcctcaccaataacttcagagaagtcagttggagaaaatgaagaaaaggctggctgaaaatcactataaccatcagttactggtttcagttgacaaaatatataatggtttactgctgtcattggccatgcctacaga

SEQ ID NO: 1630 - DNA, 220 bp, Homo sapiens
ccttgccggcatcctccttgcctctgtaccttctcttcccatgtgtgaacgggatgtaccggtacttaatcatgtgcttgatttgcctcttcatcgtgatacagaagagcatgatgaagtacatcaccagaatcggccagaacaccgggacgttgaaagcgtcgaagaaagtacagaccatagccacaaggatgcccttggtagccgcatgccaaaattt

SEQ ID NO: 1631 - DNA, 504 bp, Homo sapiens
ccatccccttatgagcgggcgcagtgattataggctttcgctctaagattaaaaatgccctagcccacttcttaccacaaggcacacctacaccccttatccccatactagttattatcgaaaccatcagcctactcattcaaccaatagccctggccgtacgcctaaccgctaacattactgcaggccacctactcatgcacctaattggaagcaccaccctagcaatatcaaccattaaccttccctctacacttatcatcttcacaattctaattctactgactatcctagaaatcgctgtcgctttaatccaagcctacgttttcacacttctagtaagcctctacctgcacgacaacacataatgacccaccaatcacatgcctatcatatagtaaaacccagcccatgacccctaacaggggccctctcagccctcctaatgacctccggcctagccatgtgatttcacttccactccataacgctcctcatactagg

SEQ ID NO: 1632 - DNA, 411 bp, Homo sapiens
  misc_feature 315: n = A,T,C or G
cacggtggctcacgcctgtaatctcagcactttggaaggccggggcaggcggatcacgaggtcagaagatcgagaccatcctggctaacacagtgaagccccgtctctactaaaaatataaagaattagtcgggcatggtggcgggcgcctgtagtcccagctactcgggagactgaggcagaagaatggcgtgaactcaggaggcggagcttgcagtgagccaaggcgacagagcaagactctgtctcaaaaaataaaaaatagtgcactgtccttcgagaaagttttctaacatctagtaatttgtaacttanaagtggagttgccttgtggatgtcttttttgcattctgtaggaaatgaaacgtgaatttaactcgggttgcaagaaataaaaatgtcagtgcattt

SEQ ID NO: 1633 - DNA, 403 bp, Homo sapiens
  misc_feature 181, 375: n = A,T,C or G
cctgctggagaacagtggtcagatctgctggctcacttggggaacacagtgaccacttcataaccctcaggtggtgtgactcgctcccgggcatgcttctcacagtagatttgatcctccacaaagaaatggcccttctgtttcaggttggtgccacagtcagtgcacacataacactcanggtggcggtgacggtcccgcagcttcacaaacacaccaacaatcccagtgccacatttgtcacacataggcaacttctgagcatttccaatcgacgcagccactttagtgacaggagctttaacacttctgaatcctgagggcttgttgggatcccctttttcttcagactccaggatttcctgcaaaaccaanaaagacgtggactgtttcgggggctcat

SEQ ID NO: 1634 - DNA, 309 bp, Homo sapiens; identical to SEQ ID NO: 1153

SEQ ID NO: 1635 - DNA, 414 bp, Homo sapiens
  misc_feature 401: n = A,T,C or G
gtgtgtgtgtgtgtgtgtacgtgtgctgtgtgtgcatgtgctgtgtgcatgtgtgtgctgtgtttgtgtgtgtgctgtgtgtgctgtgttcgtgtgtgctgtgttcgcgtgtgtgtgctgtgtgtgcatgtgtgtgctgtgtctttgtgtgtgtgctgtgtgctagtgtgctgtgtgtgcatgtgtgtgcgtgtgctgtgcgtttgtgtgctgtgtgctcgtgtgtgtgctgtgttcatgcgtgtgctgtgtgttgtgtgtgtgtagctgcggggatgcataaagtatgagtgctttttaggatgggaattgggatgtaagatttgggggtgagggtcgtgccaattacatttcatttgcatggattttggttttcatgctctgtcctgcacatcactcangatttcaatggtg

SEQ ID NO: 1636 - DNA, 64 bp, Homo sapiens
aaaggaagccagcaccatagcagagtacataagtggctatcagagaagccagccgatatggatt

SEQ ID NO: 1637 - DNA, 514 bp, Homo sapiens
ccagagcacgtgaggatctgcaaaaaatgaaacaatttgctcaggattttgtgatgcacacagatgtcagaacctgctcgtcatctactagtgtcattgcggacctccaggaggatgaggatggtgtttatttcagctcatacgggcattatgggatacatgaagaaatgctaaaggacaaaatacgaacagaaagctaccgagatttcatataccaaaatccacatatcttcaaagacaaggtagttttggatgttgggtgtggaactggaattctctctatgtttgctgctaaagctggggcgaagaaggttcttggagttgatcaatctgaaatactttaccaggcaatggatattataagactaaataaacttgaagatactattacactaattaaaggaaagattgaagaagttcatcttcctgtagaaaaagtagatgttatcatatctgagtggatgggctattttcttctgtttgagtctatgttagattctgtcctttatgcaaa

SEQ ID NO: 1638 - DNA, 163 bp, Homo sapiens
cctgtgacaagccacactgtcctccagaacccatcgagctttaggcaaaatgttttaggcatctgactaaggagcccacccgagtatgagtaacagaagccaagatctgagctttctagagggcagggcctctttctagtccccagcctcttcctgtgcttgt

SEQ ID NO: 1639 - DNA, 527 bp, Homo sapiens
  misc_feature 404: n = A,T,C or G
cctactttgaaaacgactgctgggtcaggtacttcctgcacacaggccacctgaccattgcaggctgcaaaatgtcaaagtcactaaaaaacttcatcaccattaaagatgccttgaaaaagcactcagcacggcagttgcggctggccttcctcatgcactcgtggaaggacaccctggactactccagcaacaccatggagtcagcgcttcaatatgagaagttcttgaatgagtttttcttaaatgtgaaagatatccttcgcgctcctgttgacatcactggtcagtttgagaagtggggagaagaagaagcagaactgaataagaacttttatgacaagaagacagcaattcacaaagccctctgtgacaatgttgacacccgcaccgtcatggaaganatgcgggccttggtcagtcagtgcaacctctatatggcagcccggaaagccgtgaggaagaggcccaaccaggctctgctggagaacatcgccctgtacctcacccatatgctgaagatcttt

SEQ ID NO: 1640 - DNA, 270 bp, Homo sapiens
  misc_feature 17, 262: n = A,T,C or G
attaggttttggcacanagcaggcgccctatggaatgcagacacagaattaccccaaaggcggcctcctggacagcatgtgtccggcctccacacccagcgtactcagctctgagcaggagtttcagatgttccccaagtctcggctcagctccgtcagcgtcacctactgctctgtcagtcaggacttcccaggcagcaacttgaatttgctcaccaacaattctgggacgcccaaagaccacgactcccctgagaacggngcggacag

SEQ ID NO: 1641 - DNA, 495 bp, Homo sapiens
ctgatgtattttaatctgtttctgttctatcttgtaattaatttggtgggttctacttgttttaacataaataaagagtatgcagcacgtttaataaaatcagaactcttaattggcttatgcccaggtctaggctgagaagtcctttttcttcttcccacctttatttccttagtttctgtccaccttaatcgaaacaacacatggttatgtctttttcctgctacaactacagggtacttgagcctttcccctcaagtgcattcgaagtcacccaggatgatcctcactagtagcctgctttggcagtgtggctttttgcacacttgccctgtcttcctgagactacttcagtaagccatgcttccttcttccccacttttatttggtgtcatgaatagaaacttccaaatgtaaccatggaagctaagtttggcctgctttgctttttagtctccacaccatgggcagaactgctgtctttactacttcatc

SEQ ID NO: 1642 - DNA, 504 bp, Homo sapiens
  misc_feature 407, 486: n = A,T,C or G
gcctgagcggggaagcccgcaaacaggtggaggtcttcagacagaatcttttccaggaggctgaggaattcctctacagattcttgccacagaaaatcatatacctgaatcagctcttgcaagaggacttcctcaatgtggctgacttgacttccctccgggccccactggacatccccatcccagaccctccacccaaggatgatgagatggaaacagataagcaggagaagaaagaagtccctaagtgtggatttctccctgggaatgagaaagtcctgtccctgcttgccctggttaagccagaagtctggactctcaaagagaaatgcattctggtgattacatggatccaacacctgatccccaagattgaagatggaaatgattttggggtagcaatccangagaaggtgctggagagggtgaatgccgtcaagaccaaagtggaagctttccagacaaccatttccaagtacttctcanaacgtggggatgctgtgg

SEQ ID NO: 1643 - DNA, 372 bp, Homo sapiens
ctgaggaagctcttcattggagggttgagctttgaaacaactgatgagagcctgaggagccattttgagcaatggggaacgctcacggactgtgtggtaatgagagatccaaacaccaagcgctccaggggctttgggtttgtcacatatgccactgtggaggaggtggatgcagctatgaatgcaaggccacacaaggtggatggaagagttgtggaaccaaagagagctgtctccagagaagattctcaaagaccaggtgcccacttaactgtgaaaaagatatttgttggtggcattaaagaagacactgaagaacatcacctaagagattattttgaacagtatggaaaaattgaagtgattgaaatc

SEQ ID NO: 1644 - DNA, 462 bp, Homo sapiens
ctggagctgacttttttggattttctcatccagccatccacaacctgatccagagctgtccaggagctcgaaaatgcatcaattaccagtgggtgaaatttgatgtgtgcaaacctggagatgggcagctacctgaggggctgccggagaatgatgcagctatgagctttgaagcctttcagagacagatctttgatgaagatcagaatgatccccttctgccaggatccttggacctcccagagcttcagcctgcagcctttgcgtcttcttaccagcccatgtacctgacacatgaacccttggtagatactcacctgcagcacttgaagtctccatcacagggtagcccaattcagtcttcagattgaacaagaagggatcagatgccacatcgtttttgtcgtgattaatttaacttaaactaaaattttgggtatatgaaagaaggcagcaattcag

SEQ ID NO: 1645 - DNA, 479 bp, Homo sapiens
ccagggtctggaagggccctgggagcgcccaccccctctggatgagtccgagagagatggaggctctgaggaccaagtggaagacccagcactaagtgagcctggggaggaacctcagcgcccttccccctctgagcctggcacataggcacccagcctgcatctcccaggaggaagtggaggggacatcgctgttccccagaaacccactctatcctcaccctgttttgtgcttttcccctcgcctgctagggctgcggcttctgacttctagaagactaaggctggtctgtgtttgcttgtttgcccacctttggctgatacccagagaacctgggcacttgctgcctgatgcccacccctgccagtcattcctccattcacccagcgggaggtgggatgtgagacagcccacattggaaaatccagaaaaccgggaacagggatttgcccttcacaattctactccccagatcctc

SEQ ID NO: 1646 - DNA, 234 bp, Homo sapiens; identical to SEQ ID NO: 302

SEQ ID NO: 1647 - DNA, 457 bp, Homo sapiens
  misc_feature 421, 444: n = A,T,C or G
cctggaaggaggggggcaggagacagcccagaagcagttctgcaaggaggtttagcaggggtggcgcggagatttgatccttggaagaaatcctatgctgctgggagttgagattcctgagaattagagagaaaagaactttgggtgcccttaggtaaattatgtaaacacactgagctgtcttgggtgcccaggatttggaaatggggcctgggggcagtaggagctggtgctccagaagtcatatttgcgggaggttgtggggatggaaagggtgggtaagccctgaccctgagggtctcacatgactttcagcacatggagcctccatggggactttggcttcaaagccatcaagctcaagagtgtgggcaagtgtggagacagaggtgactctccccagtggatgctgaagaacttnaaaggtgactctgtgggccgggnacatccggcacag

SEQ ID NO: 1648 - DNA, 566 bp, Homo sapiens
  misc_feature 208, 542: n = A,T,C or G
aaagcaagaaacagaatgcgagtaatcagaaagcactagcaggcatcagttaatccaagatactagctcttagttccaaaagcacttgcaaagaaaaccttttggggggaaggggtggagagggatggaagcactccataataactggaatcccatgagtgtgtatgccaagtctcatgaggctattttttgaatttatcctttactnggtcatggttttttccctcaaatacaatttttctttgactttttttcctcaaagtataaaaagtatgaaatataaacaagctcttgcactgcacacttagaagtgtacaattcaagcattatagagctatctacacactgataaatcccatcgaatcttggataattcattaatatacaaaatatcagggcacagaaagaactaaaacccacttctttttgttacacataagattcaaatattcaatctaaagaaaaacacaatcactttcgctctcttctacatctgcatggtgatacacttattaaaatattcctgtataatcatgtttggngttactatttcaagtcaggtttac

SEQ ID NO: 1649 - DNA, 306 bp, Homo sapiens
  misc_feature 113, 122, 129, 149: n = A,T,C or G
ggctggtctcgaactgtcttcaagtgatccacccacctcggcctctcaaagtgctgggattacagtcgtgagccaccgcgcctggctatgtgaagattttgaggcacgctgancctacacangcaggtngcgggtgcagcactccagcncttctctgacattaggttacactcaacttctctggcacctctcctgtgcagccaactgaatgttttgaggtttctcctttcttattcttcctttgaaagaacccaaacagctcatcttctggtataaatttgaaaacatttttgctgaatattatat

SEQ ID NO: 1650 - DNA, 397 bp, Homo sapiens
aaaaagaaaagttgaattatggtttccagagctttaggagtccatcttcactgtaggtagcaatcaggttctgatgagggtgatgtgcaataccaatcacatccttctcgtgcactgtcaaagttctctccagtttgccagtgactgtactgaaacagtagagcacaaagccctcccctacacagtagatccattcaccacggggagagagggcacagcaaacaaagtccccaccttctcttttaccagaactgaagcttctgacaatctgcccctgcatgttcatgatgaccaccgtgtttgatctgttgcacaccacaaagtgctcagggtttttaggaagtagaatcacactgttgacggtaatatctgtccctgcggtgctgcccagggattt

SEQ ID NO: 1651 - DNA, 506 bp, Homo sapiens
ctgggcttccatcaatagttcattcacttctggactaacaccatggagggggatacaacttcgtccagttgagaagggggagtgcaaatatgaggttctgttgtcccagtcatcaggcaaagaaaatgatgttgtgccaggaggttgagataccttgtttgtgtctgacacctgtcctgctgaggcttgccatctgctatataacagtcctgagcccactcgatcttgcacaaatttaagattccctgacgaaagcagttgctgggctctgtgctgccagttcacggttctttcaatcatatatcgaagtgcatctccctcaggaaggcgaactcggatacgctgaagggaggcgagcaggggcagaattttctctaatggaggtttctctgacctccgacaatggggacaaagccagattcgcaggccctgtgaaatactgggtaccgccacacaactggtgtggaaagcatccctgcagagttcacattgaatcataggggcag

SEQ ID NO: 1652 - DNA, 265 bp, Homo sapiens
caccattatgcagaatccacgccagtacaagatcccagactggttcttgaacagacagaaggatgtaaaggatggaaaatacagccaggtcctagccaatggtctggacaacaagctccgtgaagacctggagcgactgaagaagattcgggcccatagagggctgcgtcacttctggggccttcgtgtccgaggccagcacaccaagaccactggccgccgtggccgcaccgtgggtgtgtccaagaagaaataagtctgtagg

SEQ ID NO: 1653 - DNA, 364 bp, Homo sapiens
cttagcggctgctgttggttgggggccgtcccgctcctaaggcaggaagatggtggccgcaaagaagacgaaaaagtcgctggagtcgatcaactctaggctccaactcgttatgaaaagtgggaagtacgtcctggggtacaagcagactctgaagatgatcagacaaggcaaagcgaaattggtcattctcgctaacaactgcccagctttgaggaaatctgaaatagagtactatgctatgttggctaaaactggtgtccatcactacagtggcaataatattgaactgggcacagcatgcggaaaatactacagagtgtgcacactggctatcattgatccaggtgactctgacatcatt

SEQ ID NO: 1654 - DNA, 454 bp, Homo sapiens
ccagatccattttcagtggtctggatttctttttattttcttttcaacttgaaagaaactggacattaggccactatgtgttgttactgccactagtgttcaagtgcctcttgttttcccagagatttcctgggtctgccagaggcccagacaggctcactcaagctctttaactgaaaagcaacaagccactccaggacaaggttcaaaatggttacaacagcctctacctgtcgccccagggagaaaggggtagtgatacaagtctcatagccagagatggttttccactccttctagatattcccaaaaagaggctgagacaggaggttattttcaattttattttggaattaaatacttttttccctttattactgttgtagtccctcacttggatatacctctgttttcacgatagaaataagggaggtctagagcttctattccttgg

SEQ ID NO: 1655 - DNA, 107 bp, Homo sapiens
aaattatggaagtggaaattacaatgattttggaaattataaccagcaaccttctaactacggtccaatgaagagtggaaactttggtggtagcaggaacatggggg

SEQ ID NO: 1656 - DNA, 451 bp, Homo sapiens
ccatttgtcatcactgggaaccagagacacccatccctacgccagcttgagccgtgcactgcagacacaatgctgtatttcttctcccagtcacctgatgagccagcagtatagaccatatagtttcttcactaaattgactgcagatgagctgtggaaaggcgctttagcagagactggtgctggagcaaaaaaaggaagaggcaaaagaactaaaaagaagaaaagaaaggatctgaacaggggtcagatcattggtgaagggcgttatggttttctatggcccggactgaatgtccctcttatgaaaaatggagcagtgcagaccattgcccaaagaagcaaggaagagcaggagaaggtggaggcagacatgatccagcagagagaagagtgggaccgaaagaagaagatgaaggttaaacgggagcgaggatggagtggaaactca

SEQ ID NO: 1657 - DNA, 501 bp, Homo sapiens
  misc_feature 41, 156, 236, 344, 421: n = A,T,C or G
aaattcttcattttaccagcaactgctgacatcaaagtctnccctcccccaacaacaaaaatacaattaaaaaaaataaataataaagtcatttgtgatcgttgctgtggttctgagctgcaaaggcactttcaaatacagaactacttgtacgtnatcataaaaccaatatacaaaaacaactcaagagtcaataaatataaataaaactatgatctaagactgcatcaccattnggacatctggcagaagtgggagctcaaagaccagggggctgggcaggctcctgggagcctgatccgagaccgtgtcggctgcaaggggacacacaaccagggtactgntgactagctttttgcatagctgtgagatgcggcactcgatttcccagccaaccacagaaactaccattgccagtgtnagccagcttgtcaaaacttaaattaacacagggattctaagtcagcaacggcctcagactcgagtatgacacgacagttt

SEQ ID NO: 1658 - DNA, 456 bp, Homo sapiens
  misc_feature 441: n = A,T,C or G
cctacagacttatttcttcttggacacacccacggtgcggccacggcggccagtggtcttggtgtgctggcctcggacacgaaggccccagaagtgacgcagccctctatgggcccgaatcttcttcagtcgctccaggtcttcacggagcttgttgtccagaccattggctaggacctggctgtattttccatcctttacatccttctgtctgttcaagaaccagtctgggatcttgtactggcgtggattctgcataatggtgatcacacgttccacctcatcctcagtgagttctcccgccctcttggtgaggtcaatgtctgctttcctcaacaccacatgagcatatcttcggcccacacccttaatggcagtgatggcaaaggctattttccgccgcccatcgatgttggtgttgagtactcgcaaaatatgctngaacttttcagggat

SEQ ID NO: 1659 - DNA, 476 bp, Homo sapiens
  misc_feature 10, 13, 16, 31, 50, 61, 106, 276, 366, 400, 413, 433: n = A,T,C or G
aaaccctttnctnctnccattttgacatttncacttggagaacacttganttgtgaaggtnttgggcatccaccccagaaagtgggaatttgattttatccttccnaactggaagaacatttttatgaagaatttttgtctaggagaatataacagtgttacccaaggttgtgtctttaagggtggttcattttctctggccttttgctactcaaagtaaagtactaggagtcctaagaaatgttctgttcttgtacattatactgattaagtcangattaatttgatttcaaagctgagaacagtggtaaaaactcgtttacagaaatgcattttggaagagaaaaatactgtaaaacgtgtcgngaatgtttcttcagtttcttgttcagccaatgangaaagggcattgnctttctttttaccattaatnacttctcaataaacgtgagatcctgttgagcataaaaaaaaaa

SEQ ID NO: 1660 - DNA, 116 bp, Homo sapiens
caggtaaaaaatgactgttcaggagtgttcaagtagggtcagatgaccagtgattgggaatacttcgtaagcaggagcaagtaagatctgagccactgttctatcggtagggtgtc

SEQ ID NO: 1661 - DNA, 386 bp, Homo sapiens
aaagataactcagcatgtttgtaaagcaggatacattttactaaaaggttcattggttccaatcacagctcataggtagagcaaagaaagggtggatggattgaaaagattagcctctgtctcggtggcaggttcccacctcgcaagcaattggaaacaaaacttttggggagttttattttgcattagggtgtgttttatgttaagcaaaacatactttagaaacaaatgaaaaaggcaattgaaaatcccagctatttcacctagatggaatagccaccctgagcagaactttgtgatgcttcattctgtggaattttgtgcttactactgtatagtgcatgtggtgtaggttactctaactggttttgtcgacgtaaacattt

SEQ ID NO: 1662 - DNA, 364 bp, Homo sapiens
ccatatgactcctggggccacctccacgacggcccagccccaccgacgctctgctgaaaatcctgcccctcagcaggacgcaagcttgttccccaaatagtggtgacctcaaactgcaatatgatgaaacctgcagccaacactgccctccacaagggtttctggaaaggctgaagctggagacggtaaaccacaacaccgtcccaggtcactccaggtcaccccagctaaagacattcaacaccagccaaaaggctaaagtttagtttgaagggttcaaaggcaaatacactgaaacccacgtgtaaacctgcctggttttcaaactggaagagaaacactttggtgtcttcaataacccagg

SEQ ID NO: 1663 - DNA, 5265 bp, Homo sapiens
aacaggttgctcgtgggggccccgcgggcagaagcgcttccactgcagagagccaacagaacgggagggctgtacagctgcgacatcaccgcccgggggccatgcacgcggatcgagtttgataacgatgctgaccccacgtcagaaagcaaggaagatcagtggatgggggtcaccgtccagagccaaggtccagggggcaaggtcgtgacatgtgctcaccgatatgaaaaaaggcagcatgttaatacgaagcaggaatcccgagacatctttgggcggtgttatgtcctgagtcagaatctcaggattgaagacgatatggatgggggagattggagcttttgtgatgggcgattgagaggccatgagaaatttggctcttgccagcaaggtgtagcagctacttttactaaagactttcattacattgtatttggagccccgggtacttataactggaaagggattgttcgtgtagagcaaaagaataacactttttttgacatgaacatctttgaagatgggccttatgaagttggtggagagactgagcatgatgaaagtctcgttcctgttcctgctaacagttacttaggtttttctttggactcagggaaaggtattgtttctaaagatgagatcacttttgtatctggtgctcccagagccaatcacagtggagccgtggttttgctgaagagagacatgaagtctgcacatctcctccctgagcacatattcgatggagaaggtctggcctcttcatttggctatgatgtggcggtggtggacctcaacaaggatgggtggcaagatatagttattggagccccacagtattttgatagagatggagaagttggaggtgcagtgtatgtctacatgaaccagcaaggcagatggaataatgtgaagccaattcgtcttaatggaaccaaagattctatgtttggcattgcagtaaaggatatgggagatattaatcaagatggctacccagatattgcagttggagctccgtatgatgacttgggaaaggtttttatctatcatggatctgcaaatggaataaataccaaaccaacacaggttctcaagggtatatcaccttattttggatattcaattgctggaaacatggaccttgatcgaaattcctaccctgatgttgctgttggttccctctcagattcagtaactattttcagatcccggcctgtgattaatattcagaagaccatcacagtgactcctaacagaattgacctccgccagaaaacagcgtgtggggcgcctagtgggatatgcctccaggttaaatcgctgttttgaatatactgctaaccccgctggttataatccttatctagcaattgtgggcacacttgaagctgaaaaagaaagaagaaaatctgggctatcctcaagagttcagtttcgaaaccaaggttctgagcccaaatatactcaagaactaactctgaagaggcagaaacagaaagtgtgcatggaggaaaccctgtggctacaggataatatcagagataaactgcgtcccattcccataactgcctcagtggagatccaagagccaagctctcgtaggcgagtgaattcacttccagaagttcttccaattctgaattcagatgaacccaagacagctcatattgatgttcacttcttaaaagagggatgtggagacgacaatgtatgtaacagcaaccttaaactagaatataaattttgcacccgagaaggaaatcaagacaaattttcttatttaccaattcaaaaaggtgtaccagaactagttctaaaagatcagaaggatattgctttagaaataacagtgacaaacagcccttccaacccaaggaatcccacaaaagatggcgatgacgcccatgaggctaaactgattgcaacgtttccagacactttaacctattctgcatatagagaactgagggctttccctgagaaacagttgagttgtgttgccaaccagaatggctcgcaagctgactgtgagctcggaaatccttttaaaagaaattcaaatgtcactttttatttggttttaagtacaactgaagtcacctttgacaccccagatctggatattaatctgaagttagaaacaacaagcaatcaagataatttggctccaattacagctaaagcaaaagtggttattgaactgcttttatcggtctcgggagttgctaaaccttcccaggtgtattttggaggtacagttgttggcgagcaagctatgaaatctgaagatgaagtgggaagtttaatagagtatgaattcagggtaataaacttaggtaaacctcttacaaacctcggcacagcaaccttgaacattcagtggccaaaagaaattagcaatgggaaatggttgctttatttggtgaaagtagaatccaaaggattggaaaaggtaacttgtgagccacaaaagcgagataaactccctgaacctaacggagtctcacaactcaagaaagaaacgggaaattactgaaaaacagatagatgataacagaaaattttctttatttgctgaaagaaaataccagactcttaactgtagcgtgaacgtgaactgtgtgaacatcagatgcccgctgcgggggctggacagcaaggcgtctcttattttgcgctcgaggttatggaacagcacatttctagaggaatattccaaactgaactacttggacattctcatgcgagccttcattgatgtgactgctgctgccgaaaatatcaggctgccaaatgcaggcactcaggttcgagtgactgtgtttccctcaaagactgtagctcagtattcgggagtaccttggtggatcatcctagtggctattctcgctgggatcttgatgcttgctttattagtgtttatactatggaagtgtggtttcttcaagagaaataagaaagatcattatgatgccacatatcacaaggctgagatccatgctcagccatctgataaagagaggcttacttctgatgcatagtattgatctacttctgtaattgtgtggattctttaaacgctctaggtacgatgacagtgttccccgataccatgctgtaaggatccggaaagaagagcgagagatcaaagatgaaaagtatattgataaccttgaaaaaaaacagtggatcacaaagtggaacgaaaatgaaagctactcatagcgggggcctaaaaaaaaaaagcttcacagtacccaaactgctttttccaactcagaaattcaatttggatttaaaagcctgctcaatccctgaggactgatttcagagtgactacacacagtacgaacctacagttttaactgtggatattgttacgtagcctaaggctcctgttttgcacagccaaatttaaaactgttggaatggatttttctttaactgccgtaatttaactttctgggttgcctttatttttggcgtggctgacttacatcatgtgttggggaagggcctgcccagttgcactcaggtgacatcctccagatagtgtagctgaggaggcacctacactcacctgcactaacagagtggccgtcctaacctgcgggcctgctgcgcgaacgtccatcacgttagctgtcccacatcacaagactatgccattggggtagttgtgtttcaacggaaagtgctgtcttaaactaaatgtgcaatagaaggtgatgttgccatcctaccgtcttttcctgtttcctagctgtgtgaatacctgctcacgtcaaatgcatacaagtttcattctccctttcactaaaacacacaggtgcaacagacttgaatgctagttatacttatttgtatatggtatttattttttcttttctttacaaaccattttgttattgactaacaggccaaagagtctccagtttacccttcaggttggtttaatcaatcagaattagagcatgggaggtcatcactttgacctaaattatttactgcaaaaagaaaatctttataaatgtaccagagagagttgttttaataacttatctataaactataacctctccttcatgacagcctccaccccacaacccaaaaggtttaagaaatagaattataactgtaaagatgtttatttcaggcattggatattttttactttagaagcctgcataatgtttctggatttcatactgtaacattcaggaattcttggagaaaatgggtttattcactgaactctagtgcggtttactcactgctgcaaatactgtatattcaggacttgaaagaaatggtgaatgcctatggtggatccaaactgatccagtataagactactgaatctgctaccaaaacagttaatcagtgagtcgatgttctattttttgttttgtttcctcccctatctgtattcccaaaaattactttggggctaatttaacaagaactttaaattgtgttttaattgtaaaaatggcagggggtggaattattactctatacattcaacagagactgaatagatatgaaagctgattttttttaattaccatgcttcacaatgttaagttatatggggagcaacagcaaacaggtgctaatttgttttggatatagtataagcagtgtctgtgttttgaaagaatagaacacagtttgtagtgccactgttgttttgggggggcttttttcttttcggaaatcttaaaccttaagatactaaggacgttgttttggttgtactttggaattcttagtcacaaaatatattttgtttacaaaaatttctgtaaaacaggttataacagtgtttaaagtctcagtttcttgcttggggaacttgtgtccctaatgtgtttagattgctagattgctaaggagctgatactttgacagtgtttttagacctgtgttactaaaaaaaagatgaatgtcctgaaaagggtgttgggagggtggttcaacaaagaaacaaagatgttatggtgtttagatttatggttgttaaaaatgtcatctcaagtcaagtcactggtctgtttgcatttgatacatttttgtactaactagcattgtaaaattatttcatgattagaaattacctgtggatatttgtataaaagtgtgaaataaattttttataaaagtgttcattgtttcgtaacacagcattgtatatgtgaagcaaactctaaaattataaatgacaacctgaattatctatttcatcaaaccaaagtt

SEQ ID NO: 1664 - DNA, 911 bp, Homo sapiens
ccaaaagaaattagcaatgggaaatggttgctttatttggtgaaagtagaatccaaaggattggaaaaggtaacttgtgagccacaaaaggagataaactccctgaacctaacggagtctcacaactcaagaaagaaacgggaaattactgaaaaacagatagatgataacagaaaattttctttatttgctgaaagaaaataccagactcttaactgtagcgtgaacgtgaactgtgtgaacatcagatgcccgctgcgggggctggacagcaaggcgtctcttattttgcgctcgaggttatggaacagcacatttctagaggaatattccaaactgaactacttggacattctcatgcgagccttcattgatgtgactgctgctgccgaaaatatcaggctgccaaatgcaggcactcaggttcgagtgactgtgtttccctcaaagactgtagctcagattcgggagtaccttggtggatcatcctagtggctattctcgctgggatcttgatgcttgctttattagtgtttatactatggaagtgtggtttcttcaagagaaataagaaagatcattatgatgccacatatcacaaggctgagatccatgctcagccatctgataaagagaggcttacttytgatgcatagtattgatctacttctgtaaktgtgtggattcyttaaacgctctaggtacgatgacagtgttccccgataccatgctgtaaggatccggaaagaagagcgagagatcaaagatgaaaagtatattgataaccttgaaaaaaaacagtggatcacaaagtggaacgaaaatgaaagctactcatagcgggggcctaaaaaaaaaagcttcacagtacccaaactgctttttccaacttagaaattcaatttggattt

SEQ ID NO: 1665 - DNA, 2013 bp, Homo sapiens
tctctctctcctctccacacagagcttagaagcaaagttaagagactcatcagattctgagctgctgcgggatattttgcagaagcacgaggctgtccacacagagcctttggatgagctgtacgaggtgctggtggagaccctgatggccaaggagtccacccagggccaccggagctatttgctgacgtgctgtattgcccagaagccatcgtgtcgctggtcggggtcctgcggaggctggctgcctgccgggagcaccagcgggctcctcaattctacatggcccttaccgtctgcaacccagagatgtgccagctgttcaccaccgagctatgctggactgggatcagatgggaagcggaagctcatcatgaccagaaactgtttccctacagagagcacttggagatggcaaagctgaacctcacactgtaggactcacacatgactccaacgggattgtgagaattaagtcactctcgtgggaagaatttttatatgggaaagcggataaaactttcattggactggaatgtttggagaatgttaaattccaaatcaggaaccacaaactgcgctctaataagacatcggctatctaagcatgtgggttccccctttctgccagcagttctggttcttaagaaaatcaccataaatcagacatgaaaattctggctccaaaaatagcattttcattgtgcaaataaaaacgtgtgtatcaagtatgacattcccccaacgtggacacacttggttcctcacaaagccaagcccgctgcagctgccacatccctggacacactcgtttcctcacaaagccaagcccgctgcagctgccacatccctggacacactcggttcctcacaaagccaagcccgctgcagctgccacatccctggacacactcgtttcctcacaaagccaagcccgctgcagctgccacatccctggacacactcgtttcctcacaaagccaagcccgctgcagctgccacatccctggacacactcggttcctcaaaaagccaagccggctgcagctgccacatccctgggtttatgatgcagcaggtgcttttttcaagacaggaatcaaagtgttaggaacatggcagaaaggtgacacctggagaccaaatgcagggtaaggagtactgcagaggtcacagggaagtcacagaacagtaatacgctagcaggggcatggggcgtgaagaacagaagacaggaagcgtttcagagactccaaagaagaaatcagggccaaccacagcttcccgagtcattcaccaggtggcaccactgccttcatttcagcttccggccactgggaggcgctgctcgaaagggtttgccctgagacaccaagaagaagctgcgggaaggacagcaggggccctggggttttagcctctggcccaggagttatgtgtccataaccaaagggagcacagtctgcacccagctctcatcccatcagagctgctgcgactcccgcaggttcttccagaactggtttagcttgcctgcaggatcaggaaagtttgagaaaagcatctgcaaaatactaaagagcagagcttacttcattgcctgtccccaccccatcccaggtcaccacctggctgaacccaggtccccgacccaacaacaacccctcccaagtccctaactccctcacttggacttgagacccttcacaacccagcagcgctccgcctccaacttgacatcatgctttctggaaacttccccgtgtgtcccactttcccacacttggtgcgctggagcaccttccggcctctacatgctgtacgttcccctgtgagcaccctcctctcagcctctggccaacacagtcccacccatctgtgggtaacaagggggtgtgggtgttcttttcagccttgctaaactgtctgaatcaaggatcacaaactacagcctgcaggccaaatccagcccacagcctgtgtttgtaaataaagctttattggaacaaagcc

SEQ ID NO: 1666 - DNA, 451 bp, Homo sapiens
ctgttcaccaccgagctaggccgggctgggatcatatgggaagcggaagctcatcatgaccagaaactgtttccctatggagagcacttggagatgacaatgctgaacctcacactgtaggactcacacacgactccaacgggattgtgagaatcaagtcaatctcatgggaagaatttttatatgggaaagcggataaaactttcattgtactggaatgtttggagaatgttaaattccaaatcagaaaccacaaactgccctctaataagacatcggctatctaagcgtgtgggtgccccctttctgccagcagttctggttcttacgaaaatcaccatatatcagacatgaaaattctggctttgtgcagataaaaaagtgtgtatcaagtatgacgttcccccaatgtggacacacttggttcctcagaaagccaagcccactgcag

SEQ ID NO: 1667 - DNA, 3149 bp, Homo sapiens
taatgaggaatcaaaggaagaagaagaaagagagaggaaggaaggttggaaggaaggaaggagggaaaattagaaggggaaaccatgattgctggtgaggttttgagcacattttcctgcaggctggtatgggtgagaggtttggtcttgtttgcaaatcttctgaaggccattccagaggagcagttgccactgccccatcccctgagctctgagcatgggggttcccctggggagactcctggtgagaggatgccgatttctgctgatctgtcactgggtaccgaggactgggtgtgtttaaggcagacagccaggtgaggatcccagctactggggcctgctgtcatctcctgggagtacccgggggtcaggagcctaggggactcttgcacttcacatccagccatgctaattacactttttggcaaaggaaacagctaggagcagtttctttcactcctacagccccgttttctcagtgtttagacctcgaattattactgggctagagggaaggcagcctctgaagtgtggcaggaggaggggaagtctgcctgcatcttggtgtgtctgtcagatgccagcactaataacctggcttctgtgaggcctgtcagtgctctcaggaatgaaaggggacccctgagaggtgctcggtaccagcaggctgtgaatgctctctacccaccaccctcacctcctcgttaaagatggtgctatctgccacacagcagacatctggtcgctgcacacccgaaagaccccaaggcagtctgccccttgtccagccacacgccagcacccaccctcctggcccctgcctcggcctccccagaccagctgcacccagcccccaacacgcaccccttctccagatgtgtgcagggcctcattttgcagagcaaagacagatgtttcagccacacgctttattaacttctaaaacctgtgctcaggacactcttcaacagtcatgaaaagtttgatcacttgccacagtcaggacctttgtgtggggctctgatctgatgttcggtctcatcatctcccaaaccagcagtcgtttgtaccccaaccctctgctcaggggctcatacccccaaatgattttcctgatttatgtatttccctacaaagggctttctatacctagcatctgcctccagcatgagaagggggaataggtgagacccatttgccagtagcagacggggaccctggggagaaaatggcagagcctgttggagactccctgtctccagctgaccagccaatgggattcctcttccctccactgtctcccacaaagtagaagaatcctggtacatttagcccatgagcctggcacagatccctatctagacatgaggccctttagacatgactttggcattgaccagcctgttggcaatgggtcggggaggcagaggggatgctcacaccagtaattctcatcccctgaatgcttgggatcacctggggagagttcacaaaaaactggtgcaggggtcccacctctgatgatgctgagtggtgggtctggggtgtggcccaggcatcatgatgtttcaggcccccaggtgacttcttaggcagcccagctaagcccctagagccttgcaatttcccccaaatgacctcagagggcccgatttgagggaaatgcctaacttcaggggccgtaagaatcccccagggagcatgtgaaatgcagataccaggcccacccccagagatgagctgaggtgggtcaggggtgaagtgcagggatcagtgtttttcacaagctccatacctccaggaaatggtgttgtggttgggcccgtagaaaacattctgagagtcctgttgcctgtgccttggtgcacgtggggtggaatcccagtggccctgccttgaggaggatgtgcattaacgtggtaggggagacagagacagctccacctgccccctgtcccaccggggacctccaaaaacttcatggatgttagagcaagcagccatgctgcagcagaggatgaggctggcggatttagtaagagccctctgtgtttgggctgagttctttctctagttgccctgtcatctggcctctggataacccacctctcctccctcatcctaaaattacagatggcgaaagacggccacatttagtgagacccctaaggtcctccaactagggtgggtccacagtggcccctggtgcatggaccacacactctcttccctcctctggctcaggactacggtctgaaattagggagatatgaatgtctttcttgaaaacttctcttcccagtcttcccactttgcttgggggtccttggtcaaggccagctttggggactagggcttgttgcgactaccagctgtctcattttgctgtactgcaaactcaggcttggttccaagcttatgggggccctgtccttcccctagtagggtttgttttggggtcacatctggtcatacccttcagagagctcttccccagcctctacatcagggagagaggtaggtagggaggagcattcaaggattagaagaaggactaaagtacaacagccttggaggaactgccaggaactaagggcgagcactggagaaggcaacctgggacccccctgcgcttctgagcaggaagaccaagaccttcaggggccctaagcactgaaaacatcattcctcatccccaagccctggcatccccctgttcttctaaaataattcttttctaggtatttctgattgcaaaattctggatgggttcatccaagctgacctttgctgtttttccccttcccaacaaggcctcactttttggagccaccttagctggtgcctaggcagaggggcagtcagcagtggttatcaggatcctggctctatgggttgccttcctcctggtctgtaaagcccctgcaggcagggacttcttagatagctgcttccttagggcatggcatgtagtgggtggttaatgaatgtaagagagggaatgagtgatcaagggagggaggagggagtggagtggagatttctcatcctttcctgttaatttatgacatcctcctgcctatgagtccttgactctggagttttacaaagcagtcacatttcaaataaaagtctgggaaagcaac

SEQ ID NO: 1668 - DNA, 408 bp, Homo sapiens
aaacagtaagggactgcaattttctattctttttctaatatccttatttagcaaaattaaaagttggcgatgatgtgttgctttcccagacttttatttgaaatgtgactgctttgtaaaactccagagtcaaggactcataggcaggaggatgtcataaattaacaggaaaggatgagaaatctccactccactccctcctccctcccttgatcactcattccctctcttccattcattaaccacccactacatgccatgccctaaggaagcagctatctaagaagtccctgcctgcaggggctttacagaccaggaggaaggcaacccatagagccaggatcctgataaccactgctgactgcccctctgcctaggcaccagctaaggtggctccaaaaagtgagg

SEQ ID NO: 1669 - DNA, 576 bp, Homo sapiens
ccttctctcctacctcccaggagtatgtaactcagatccttagcataaagatccccaggaataccactgctctaacccggtgaacattttttctaatgcagggttaggcttacgtctgaattccacaagacatcctccccctccagtacggaagttccaaggcacttgttttccagcatatcagcctaacctcagtgccttgaaatatggctttaagcctttgagaactgagatttcctgaaaccataggcccttgccccaggggtttctccacatccgggtgttaagacacctgatggcactgttggtttgtcccctataccccagaaaatctatcctgcaaggtagctacttcaatcttgtcattaaaatgtgtcaagtcacagctcgcaatgccaaaggaatgctggggcagtaagtgaggtggataagtgagaagggcctggtggtgaaagcggccagggaccagaatgctccagacctacagagctggtcaaggttaagtgccttaaacttaccaatcctggactcagttctcctttgaaaggagaaagtctttgtcctctacttaggcag

SEQ ID NO: 1670 - DNA, 746 bp, Homo sapiens
aaatttataaatgctggagggggccatctgatttgaataaagttgaaagaacatgttaaagtcagtcttaaggagtcacgtttgagtatgtaaattttgatctttctaatatgttggtttgtatattcagttttaactgtatgaatctgatttgcaaatgagaatttggaaaagttaaattagttacaaagaaatatgttaatttaattagacaatactctggaaggaattttatcttctttcaacaaaacatgttttatagtattctgacttacggttgcttttgagttttactcatttggatatattaagatgcacacagtgaagcaaattaaactccactttacgctggaatgctttctttagcatgaaaataccaggtccttggatttgggattttaatttcctatggaaagttgcttaaattgtggacactggaattaatctgaatgtcactgaggaatttcacatgaagtgtaatccctagtcaataagaattatccattacattattttatgggaaaactaggctaaattacatccattcaggtaaaaggaccttagcttactgaaggatctaaagagcaaagcaaagatctcactactcaaacactcagcctgcttccttcaagtccccttgcaggccagctttgtgctttgcagaccaactttttaatgagatactttgcttcctcattcaacattgaagctaggcttcaattaaaaggttcgaggaagctccattt

SEQ ID NO: 1671 - DNA, 2442 bp, Homo sapiens
ggacgagccagaactgtcggacagcggggacgaggccgcctgggaggatgaggacgatgcagatctcccccacggcaagcagcagaccccctgcctgttctgtaacaggttattcacatctgctgaagaaacattttcacactgtaagtctgagcatcagtttaatattgacagcatggttcataaacatggacttgaattttatggatacattaagctaataaattttattagacttaagaatcctacagttgagtacatgaattccatatacaacccagtgccttgggagaaagaagagtatttgaagccagtattagaagatgaccttttacttcaatttgatgtagaagatctttatgaaccggtgtcagtacccttctcataccccaatggactcagtgaaaatacatctgttgttgaaaaattgaaacatatggaagccagggcactgtctgctgaagccgcattggccagagcacgtgaggatctgcaaaaaatgaaacaatttgctcaggattttgtgatgcacacagatgtcagaacctgctcgtcatctactagtgtcattgcggacctccaggaggatgaggatggtgtttatttcagctcatacgggcattatgggatacatgaagaaatgctaaaggacaaaatacgaacagaaagctaccgagatttcatataccaaaatccacatatcttcaaagacaaggtagttttggatgttgggtgtggaactggaattctctctatgtttgctgctaaagctggggcgaagaaggttcttggagttgatcaatctgaaatactttaccaggcaatggatattataagactaaataaacttgaagatactattacactaattaaaggaaagattgaagaagttcatcttcctgtagaaaaagtagatgttatcatatctgagtggatgggctattttcttctgtttgagtctatgttagattctgtcctttatgcaaagaacaaatacttggcaaaaggaggctcggtctaccctgacatttgcactatcagccttgtagcagtgagtgatgtgaataaacatgctgatagaattgctttttgggatgatgtctatggcttcaagatgtcctgcatgaagaaagcagttattccagaagctgttgtggaagttttagatccgaagactcttatttcagaaccttgtggtattaagcatatagattgccatacgacgtctatctcagatttggaattttcatcagattttaccctgaaaatcacaaggacatccatgtgcacggcaattgctggctactttgatatatattttgagaagaattgccacaacagggtcgtgttctctacgggccctcagagcaccaaaacacactggaaacaaacagtatttctactggaaaaaccattttcagttaaagcaggtgaagccttgaaaggaaaggtcacagttcacaagaataagaaagatccacgttctctcaccgtgaccctcacgttgaataattcaactcaaacttatggtctccagtgaaacagccataaaagcacactaccttgtagtttttaatgtgggggtagagtgggtcagcaggagggagctggttttatgtgagcagatggatggatgatggaccctttcctaatgagcctcctcaataagagagaagttctcattgtgggaatctgacatagttcagctgaggaagagaatcagctgatcctcatggtctgccacgtaatcattttcttagacgtttgctccaccagatttaaccaaatgtaactcccacattgagtttatctatattgaaaatcatttacattggcctatatttggaagagagatagtcttttgtttttaataagtttcttactataaattttaaacaaattggttagttatttggatattttattaaactagtaacacaggtactacacattttattatggactcctctgaggaggagtgtttaattgtatttgctagaaaatcaggatgtaataaagatttgtataaaaaaactaaaatatggaaaagagcttcagccttcatatacaaatcatatatgcagacagcctagttgattatctagcatacttagggttctcattttgtagtttcttccctctttgtgactattccttagccttatagatttctagtactgcccaggaaatctaatttcaatacatttatcctaggtttcatgaaagtttttaaagattgggataaatatgtacttatttactaacgtattatctttttcaaaccagatttatgtgcaaaggttaaacatgtaactgttactaagcagtctataaagttgtcatttacaattactgattcaatttgaaatgtagaataaaattttaataaaatgtatccttataaaatattttaaaaatattaaaaaaaaaaaaaaaaaaaaa

SEQ ID NO: 1672 - DNA, 1256 bp, Homo sapiens
  misc_feature 683, 917: n = A,T,C or G
ccagagcacgtgaggatctgcaaaaaatgaaacaatttgctcaggattttgtgatgcacacagatgtcagaacctgctcgtcatctactagtgtcattgcggacctccaggaggatgaggatggtgtttatttcagctcatacgggcattatgggatacatgaagaaatgctaaaggacaaaatacgaacagaaagctaccgagatttcatataccaaaatccacatatcttcaaagacaaggtagttttggatgttgggtgtggaactggaattctctctatgtttgctgctaaagctggggcgaagaaggttcttggagttgatcaatctgaaatactttaccaggcaatggatattataagactaaataaacttgaagatactattacactaattaaaggaaagattgaagaagttcatcttcctgtagaaaaagtagatgttatcatatctgagtggatgggctattttcttctgtttgagtctatgttagattctgtcctttatgcaaagaacaaatacttggcaaaaggaggctcggtctaccctgacatttgcactatcagccttgtagcagtgagtgatgtgaataacatgctgatagaattgctttttgggatgatgtctatggcttcaagatgtcctgcatgaagaaagcagttattccagaagctgttgtgnaagttttagatccgaagactcttatttcagaaccttgtggtattaagcatatagattgccatacgacgtctatctcagatttggaattttcatcagattttaccctgaaaatcacaaggacatccatgtgcacggcaattgctggctactttgatatatattttgagaagaattgccacaacagggtcgtgttctctacgggccctcagagcaccaaaatacactggaaacaancagtatttctactggaaaaaccattttcagttaaagcaggtgaagccttgaaaggaaaggtcacagttcacaagaataagaaagatccacgttctctcaccgtgaccctcacgttgaataattcaactcaaacttatggtctccagtgaaacagccataaaagcacactaccttgtagtttttaatgtgggggtagagtgggtcagcaggagggagctggttttatgtgagcagatggatggatgatggaccctttcctaatgagcctcctcaataagagagaagttctcattgtgggaatctgacatagttcagctgctggacatgtcctaaaagcag

SEQ ID NO: 1673 - DNA, 1035 bp, Homo sapiens
gggacattcagtccgggccatagaaaatggagcagtgcagaccattgcccaaagaagcaaggaagagcaggagaaggtggaggcagacatgatccagcagagagaagagtgggaccgaaagaagaagatgaaggttaaacgggagcgaggatggagtggaaactcatggggaggcatcagtcttggcccccctgaccctggtccctgtggagaaacatatgaggattttgataccaggatacttgaggtaagaaacgttttcactatgactgcgaaagagggaagaaagaaatcgatccgtgtcttggtggctgtggggaacggaaaaggagctgcaggtttttctattgggaaagctactgatcggatggatgctttcaggaaagcaaagaacagagcagttcaccatttgcattatatagaacgatatgaagaccatacaatattccatgatatttcattaagatttaaaaggacgcatatcaagatgaagaaacaacccaaaggttacggcctccgctgccacagggccatcatcaccatctgccggctcattggcatcaaagacatgtatgccaaggtctctgggtccattaatatgctcagcctcacccagggcctcttccgtgggctctccagacaggaaacccatcaacagctggctgataagaagggcctccatgttgtggaaatccgggaggaatgtggccctctgcccattgtggttgcgtccccccgggggcccttgaggaaggatccagagccagaagatgaggttccagacgtcaaactggactgggaagatgtgaagactgcacagggaatgaagcgctctgtgtggtctaatttgaagagagccgccacgtaacctctctggccttgtgcagccagttcctgtgctgccctgcacctaggagagactcagcccctcacagcttgggatgttaccttgccttttgtttgttttgagggaagtttaatctttaaactctttggaaataaataattatagctttcaaaaaaaaaaaaaaaaaa

SEQ ID NO: 1674 - DNA, 754 bp, Homo sapiens
aaatcttaatgaaatatcatggaatattgtatggtcttcatatcgttctatataatgcaaatggtgaactgctctgttctttgctttcctgaaagcatccatccgatcagtagctttcccaatagaaaaacctgcagctccttttccgttccccacagccaccaagacacggatcgatttctttcttccctctttcgcagtcatagtgaaaacgtttcttacctcaagtatcctggtatcaaaatcctcatatgtttctccacagggaccagggtcaggggggccaagactgatgcctccccatgagtttccactccatcctcgctcccgtttaaccttcatcttcttctttcggtcccactcttctctctgctggatcatgtctgcctccaccttctcctgctcttccttgcttctttgggcaatggtctgcactgctccatttttcataagagggacattcagtccgggccatagaaaaccataacgcccttcaccaatgatctgacccctgttcagatcctttcttttcttctttttagttcttttgcctcttcctttttttgctccagcaccagtctctgctaaagcgcctttccacagctcatctgcagtcaatttagtgaagaaactatatggtctatactgctggctcatcaggtgactgggagaagaaatacagcattgtgtctgcagtgcacggctcaagctggcgtagggatgggtgtctctggttcccagtgatgacaaatgg

SEQ ID NO: 1675 - DNA, 350 bp, Homo sapiens
cacaaagccagggccaggctccccatccctacctcccactgcatcagcagtgggtgttcctgcccttcctgagtctaggcagctctgctgctgtgatctgcacaccctccaacctaggcagggactggggggatgcagtgtgtgttagtgcccatgtggcattgtggcactgttgccccccatggcggcatgggcaagatgaccttccattagcttcaagtcttgttctcttgtctgtggtctgtttaatatgtgggtcactagggtatttattctttctcccatccttacactctggatcattgtgcagacttaatcagggttttaacgctttcatttttttttttttt

SEQ ID NO: 1676 - DNA, 523 bp, Homo sapiens
  misc_feature 200: n = A,T,C or G
tcagtgtaaacactgaccataactagaaaggaaacttaggtgcctatataattttccattccccgcctaatagtattcaactcagcctcttgaggtgggaataaaaactaaaaaaagattgatgttatagtaaaactgaacagtggcacagcaaggtgcctccctttaaggattttaccttcctgtgaagcaaacttcanagttcccatcttctcagcgtgatcacggaataggcaaacttcacaggaaggatgcctaaggatgccttttcctctctaagagttctcaggaagttgggtaggctgtgtatggactcccaactgctttaacctcctatctccatgtcttatttcccttcccctgcctgctctatcctcgcctctattttcctcagcaaacatactctgcagtcggtcccttgtccatggcacaccaccaacttttcagtagtgttaccatgcccacctctggcttcctctagtctggccatcttgtaagtgtcatactgcacaaaaaaagtagg

SEQ ID NO: 1677 - DNA, 425 bp, Homo sapiens
ctcaaaacctcactatttaatggagtgcctttgtctctacttgaattgcgttttttccttgagacccagtgcagggaatcccccatcccagggtgtttttctttccgatcttttcccagcaggaacctttaaaagcttcctccagtggaatgccttaggggtcctcccatttctgagacagaaacatggttgatctcccttactctcctgcaatttatggcttgttccagacatgagaaatgactcacatttcctttgggcagtcagcagcagatttatgcatttccctttttgttctcatcctcttatcttgacttccagataagtagatgtcttttagccaaaactttgcttttgagaagaatgactttggttttcctctctcaggtgtgagcggggcctggaccacgccatcccccactatg

SEQ ID NO: 1678 - DNA, 1275 bp, Homo sapiens
tgccgcagcccccgcccgcccgcagagcttttgaaaggcggcgggaggcggcgagcgccatggccagtccgggctgcctgctgtgcgtgctgggcctgctactctgcggggcggcgagcctcgagctgtctagaccccacggcgacaccgccaagaagcccatcatcggaatattaatgcaaaaatgccgtaataaagtcatgaaaaactatggaagatactatattgctgcgtcctatgtaaagtacttggagtctgcaggtgcgagagttgtaccagtaaggctggatcttacagagaaagactatgaaatacttttcaaatctattaatggaatccttttccctggaggaagtgttgacctcagacgctcagattatgctaaagtggccaaaatattttataacttgtccatacagagttttgatgatggagactattttcctgtgtggggcacatgccttggatttgaagagctttcactgctgattagtggagagtgcttattaactgccacagatactgttgacgtggcaatgccgctgaacttcactggaggtcaattgcacagcagaatgttccagaattttcctactgagttgttgctgtcattagcagtagaacctctgactgccaatttccataagtggagcctctccgtgaagaattttacaatgaatgaaaagttaaagaagtttttcaatgtcttaactacaaatacagatggcaagattgagtttatttcaacaatggaaggatataagtatccagtatatggtgtccagtggcatccagagaaagcaccttatgagtggaagaatttggatggcatttcccatgcacctaatgctgtgaaaaccgcattttatttagcagagttttttgttaatgaagctcggaaaaacaaccatcattttaaatctgaatctgaagaggagaaagcattgatttatcagttcagtccaatttatactggaaatatttcttcatttcagcaatgttacatatttgattgaaagtcttcaatttgttaacagagcaaatttgaataattccatgattaaactgttagaataacttgctactcatggcaagattaggaagtcacagattcttttctataatgtgcctggctctgattcttcattctgtatgtgactatttatataacattagataattaaatagtgagacataaatagagtgtttttcatggaaaagccttcttatatctgaagattgaaaaaaataaatttactgaaatacaaatatttt

SEQ ID NO: 1679 - DNA, 527 bp, Homo sapiens; identical to SEQ ID NO: 674

SEQ ID NO: 1680 - DNA, 2642 bp, Homo sapiens
ctgaacctgcagaaacagctgctcccttggcagcttgggcccttcagaacagcttgcccagcccccgctgctgccttccatggcctccagccgcagccctcaagttgaggaggggttccagcatcacactcctctgggtgaactttccctggattttgtggttggcaggcaacctgggcaaagaacagtcaccaggcaagcaggctggaaggaagaaattcttgaatgtggatagacttcctcctcccctgccctcgagctccaccccaagccacttctcacatcaccccttcttcccccacagatgtcaccgggtgcgcatcaatgtacctccacacagagggcttctctgggccctctccaggtgacggggccatgggtaaggcagccccccttcccctgccaagccctccatgttgggggagggagcgctgccatgggggagggtctccctggccaggagtccctctggactctctggggtctcatcggtgaacccccagatctgagcaacccccaatttcctccacaaggctatggctatgagaaacctctgcgaccattcccagatgatgtctgcgttgtccctgagaaatttgaaggtcagagaagtgactgttgatgggagggtcaaggtcttatcacgctgtgtccctgcaggagtcacatcacgtttcattgttgcaagagggtgggacccatagaaaagtacctggggagaccccttcgagaaatccctcgggtgggaggcggttgcttgggggaccaaaagacacaaaccccacacctcctattttcgtgttccccaggagacatcaagcaggaaggggtcggtgcatttcgagaggggccgccctaccagcgccggggtgccctgcagctgtggcaatttctggtggccttgctggatgacccaacaaatgcccatttcattgcctggacgggccggggaatggagttcaagctcattgagcctgaggaggtgggcctctcggatgttcccagccctcctttccaaagtttacagcctggaggtgggagaacctgggaaatggtggcacgtgcctccatcatgattcttgctttacctaacctgaattcttgccaagcctaagtctgtgggctgatgctttgttgcagagctagcttggcactttgcaccaagaatctcaagtgctctttctgaccttacccccattttttcctctgccaaggtagcatctctaccccaaaactgttttgttcccaggtcgccaggctctggggcatccagaagaaccggccagccatgaattacgacaagctgagccgctcgctccgatactattatgagaaaggcatcatgcagaaggtgggggctgtgggtctagggacaaggtggtggggggcagtggctgtgagaagctgactggggagagggtcagcagggcagttctcagcaactttgtaggatcagataatgaatcagtcagagagacaagaaattgtggagaatcccaaggttctcctcccccaaaaaagtgcaacactgtaactgagaagcccaagcatggagaagttgagatgaaaaaggagtaagaactgtgaagggagagtcagcttctcaggaaccagcatgggagagaaatgccccgagcatctgcctgtactggtagaagggccacattccccactcccccaccttaccccatacaaaggctgggcggctagcaggctgaccagaccttctctctccccataggtggctggtgagcgttacgtgtacaagtttgtgtgtgagcccgaggccctcttctctttggccttcccggacaatcagcgtccagctctcaaggctgagtttgaccggcctgtcagtgaggaggacacagtccctttgtcccacttggatgagagccccgcctacctcccagagctggctggccccgcccagccatttggccccaagggtggctactcttactagcccccagcggctgttccccctgccgcaggtgggtgctgccctgtgtacatataaatgaatctggtgttggggaaaccttcatctgaaacccacagatgtctctggggcagatccccactgtcctaccagttgccctagcccagactctgagctgctcaccggagtcattgggaaggaaaagtggagaaatggcaagtctagagtctcagaaactcccctgggggtttcacctgggccctggaggaattcagctcagcttcttcctaggtccaagccccccacaccttttccccaaccacagagaacaagagtttgttctgttctgggggacagagaaggcgcttcccaacttcatactggcaggagggtgaggaggttcactgagctccccagatctcccactgcggggagacagaagcctggactctgccccacagctgtggccctggagggtcccggtttgtcagttcttggtgctctgtgttcccagaggcaggcggaggttgaagaaaggaacctgggatgaggggtgctgggtataagcagagagggatgggttcctgctccaagggaccctttgcctttcttctgccctttcctaggcccaggcctgggtttgtacttccacctccaccacatctgccagaccttaataaaggcccccacttctcccatt

SEQ ID NO: 1681 - DNA, 444 bp, Homo sapiens
cagctcagcttcttcctaggtccaagccccccacaccttttccccaaccacagagaacaagagtttgttctgttctgggggacagagaaggcgcttcccaacttcatactggcaggagggtgaggaggttcactgagctccccagatctcccactgcggggagacagaagcctggactctgccccacgctgtggccctggagggtcccggtttgtcagttcttggtgctctgtgttcccagaggcaggcggaggttgaagaaaggaacctgggatgaggggtgctgggtataagcagagagggatgggttcctgctccaagggaccctttgcctttcttctgccctttcctaggcccaggcctgggtttgtacttccacctccaccacatctgccagaccttaataaaggcccccacttctcccaaaaaaaaaaaaaaagggcg

SEQ ID NO: 1682 - DNA, 1513 bp, Homo sapiens
attcacttctcacaaggactgggtgaagagttctgcagccttacagagactggaaaagaagcccaaaccaaggcccccagagaggtcccccaggcccctttgggtccctgagcctcagctggaggtggggggtgcctgcagtgcgctggctcagtctccttctgaaaagctggatccagcttgtttgaagcccttgagctgatcttagatccggcgcaggagaccaacgcctgccatgctgttccggctctcagagcactcctcaccagaggaggaagcctccccccaccagagagcctcaggagaggggcaccatctcaagtcgaagagacccaacccctgtgcctacacaccaccttcgctgaaagctgtgcagcgcattgctgagtctcacctgcagtctatcagcaatttgaatgagaaccaggcctcagaggaggaggatgagctgggggagcttcgggagctgggttatccaagagaggaagatgaggaggaagaggaggatgatgaagaagaggaagaagaagaggacagccaggctgaagtcctgaaggtcatcaggcagtctgctgggcaaaagacaacctgtggccagggtctggaagggccctgggagcgcccaccccctctggatgagtccgagagagatggaggctctgaggaccaagtggaagacccagcactaagtgagcctggggaggaacctcagcgcccttccccctctgagcctggcacataggcacccagcctgcatctcccaggaggaagtggaggggacatcgctgttccccagaaacccactctatcctcaccctgttttgtgctcttcccctcgcctgctagggctgcggcttctgacttctagaagactaaggctggtctgtgtttgcttgtttgcccacctttggctgatacccagagaacctgggcacttgctgcctgatgcccacccctgccagtcattcctccattcacccagcgggaggtgggatgtgagacagcccacattggaaaatccagaaaaccgggaacagggatttgcccttcacaattctactccccagatcctctcccctggacacaggagacccacagggcaggaccctaagatctggggaaaggaggtcctgagaaccttgaggtacccttagatccttttctacccactttcctatggaggattccaagtcaccacttctctcaccggcttctaccagggtccaggactaaggcgtttttctccatagcctcaacattttgggaatcttcccttaatcacccttgctcctcctgggtgcctggaagatggactggcagagacctctttgttgcgttttgtgctttgatgccaggaatgccgcctagtttatgtccccggtggggcacacagcggggggcgccaggttttccttgtcccccagctgctctgcccctttccccttcttccctgactccaggcctgaacccctcccgtgctgtaataaatctttgtaaataacaaaaaaaaaaa

SEQ ID NO: 1683 - DNA, 700 bp, Homo sapiens
ctgggggacaaggaaaacctggcgccccccgctgtgtgccccaccggggacataaactaggcggcattcctggcatcaaagcacaaaacgcaacaaagaggtctctgccagtccatcttccaggcacccaggaggagcaagggtgattaagggaagattcccaaaatgttgaggctatggagaaaaacgccttagtcctggaccctggtagaagccggtgagagaagtggtgacttggaatcctccataggaaagtgggtagaaaaggatctaagggtacctcaaggttctcaggacctcctttccccagatcttagggtcctgccctgtgggtctcctgtgtccaggggagaggatctggggagtagaattgtgaagggcaaatccctgttcccggttttctggattttccaatgtgggctgtctcacatcccacctcccgctgggtgaatggaggaatgactggcaggggtgggcatcaggcagcaagtgcccaggttctctgggtatcagccaaaggtgggcaaacaagcaaacacagaccagccttagtcttctagaagtcagaagccgcagccctagcaggcgaggggaagagcacaaaacagggtgaggatagagtgggtttctggggaacagcgatgtcccctccacttcctcctgggagatgcaggctgggtgcctatgtgccaggcttcaa

SEQ ID NO: 1684 - DNA, 2261 bp, Homo sapiens
gcggatggatccaacatggcggcgccgagcctgagccgagagaagagacctgggaaattaagtttcttgcggagtacggtggggattgcagctgctgagcagggattctggaaagcattgcgtacctgagcccccagcatggcgggcctaaagcggcgggcaagccaggtgtggccagaagagcatggtgagcaggaacatgggctgtacagcctgcaccgcatgtttgacatcgtgggcactcatctgacacacagagatgtgcgcgtgctttctttcctctttgttgatgtcattgatgaccacgagcgtggactcatccgaaatggacgtgacttcttattggcactggagcgccagggccgctgtgatgaaagtaactttcgccaggtgctgcagctgctgcgcatcatcactcgccacgacctgctgccctacgtcaccctcaagaggagacgggctgtgtgccctgatcttgtagacaagtatctggaggagacatcaattcgctatgtgacccccagagccctcagtgatccagaaccaaggcctccccagccctctaaaacagtgcctccccactatcctgtggtgtgttgccccacttcgggtcctcggatgtgtagcaagcggccagcccgagggagagccacacttgggagccagcgaaaacgccggaagtcagtgacaccagatcccaaggagaagcagacatgtgacatcagactgcgggttcgggctgaatactgccagcatgagactgctctgcagggcaatgtcttctctaacaagcaggacccacttgagcgccagtttgagcgctttaaccaggccaacaccatcctcaagtcccgggacctgggctccatcatctgtgacatcaagttctctgagctcacctacctcgatgcattctggcgtgactacatcaatggctctttattagaggcacttaaaggtgtcttcatcacagactccctcaagcaagctgtgggccatgaagccatcaagctgctggtaaatgtagacgaggaggactatgagctgggccgacagaaactcctgaggaacttgatgctgcaagcattgccctgacctattccctcttctcactttggggactgttcccatcacccacctctggagcttacactgttctggggtttgttctctacccttccaaccaatcacacccctgcctttttttttttttttttaaagaaaaagacaaaagaaagtggaagtggtattccccacccctccctgcacccatgtgcctgggcttcccctttatttcccttttccatttaccccgtaatgtgtctctacagctaccttaccactgagccgtaagacaaatgtataggaagaagcaaagtctacagcacatagtctttgtaagggattgatgtgaacacttttttttggatgcactaaggagttatcaatacttctggctttatgagagctcttaaattttgtctaaaaaaccaaagggctgtgagtaagggagctatgtggaaagtgggactctgaagtgtattttgaaaattaatcgccaccctcttccaaattatagaattttttaaaaacaagctgtggccctttccactctctcctggcctctggtgctgctcctctctgccgcctttcctccattccatggcttgaaacctctgcctgatgtggctccttcctttttcccatttgtcaaaccctcttcaaaggaggaacagataagactgggtcagcctagtcatgcctcccaactgtggtggtatatgtgtacacacatacacagggtggatggagaagaggttgctgattaaaatacactccccctataaaggggaagggggagtgtgacactttctttccatgttcaagtgaaaataaataatgtaccctgcagcccttttcccctttgctttcttctggcttgggcaaagggcatcataggtgtaagtgaagtaattcctttttccttccccctcctccactcctacgcccactcccatgcttgggagaatggggctgggacatgcactgagtgttgcacttttatttaggtagggaggcatgttgaatgagccaggaggtctagaactggagcttagtccagctggtacaataccaactccccttctagttcccaaaggcgatgtccagacacagactttatgattattatatttttcaatgccagtgctgctcagccctcagcagaacttcagtttccatgaaataaacaatgactatat

SEQ ID NO: 1685 - DNA, 370 bp, Homo sapiens; identical to SEQ ID NO: 1008

SEQ ID NO: 1686 - DNA, 2866 bp, Homo sapiens
tcacctgggaaatacaaaaatagcccctcctgaagataaaatcattcagaaacagagcaataattctgactcattaacttctacctactcaaaaaagtctgccatgatgatggaccgaagtgaggctttttaacccacaagtaacctttttatttttttgagacagtcttgctctgtctgtcacccaggctggagtacagtggcatgatcttggctcactgcagcctcgacttcctgggctcaaatgatcctcccacctcagcctcccatgtggctggaaccacaggcacgtgccaccatgcctggctatttttttgttgagctgggctctcgctttgttgcccaggctggtcttgaactcctcggctcaagcaatccttcccactcagcctcctgtagtgtcgagaatataggcgtgggctactacacctgcttcagccgcttctataaaaccgctgacctgtgtgtggaggacaggccaggtgtgtgctcactgcgctgcgaagatgttttgtcacgtgactttccccggatttccatttctttttttctgcttccctcaaaaactaatagaagactgggtgcggtggctcacgcctctaatcgcagcactttgggaggcagcagctggcggatcacaaggccaggagttcgagaccagcctggccaacatgatgaaaccctgtctctaccaaaaatacaaaaattagctgggtgcgatggtgggtgcctgtaatcccagatactcaggaggctgaggcaggagaattgtttgaaccccggagatggaggttgcagtgagccaagatcgtgccattgcactccagcctgggcaacagggcaagattccgtctcaaaaacaaacactattagaaaatgccctggaggtggcggggagttgttgatttgtgaggacagattgaaagcaactcccagggtggccttgtccacctccccgtcgagaatgtggctgccggcctctttgaagattgtggtctggcataaggagaggtgcaggcgcctggttctgagcaccttggaatttccagccgcacagcatctggtgccctcccctccaccctcacaaggagctgccatcctgtttggattttctgtttgtggaccagaaacaaacgtttttccaaaggattagcaaatagggtaatttcctgtgtaacgctgctctggggcctcttcctcatcctggcagaaggagcctggagcccatgaggcagccagcactgtgcccttgctcagtcgtgctgtcccctccctctccctcagtctcctctccatgcccaagtcagtttccagccgctggtcttcatggcattcccagcacagccgggcaccaagaggcaaaacccaaggcctggcttggccgtgttaacgattgtacagacattttttaaaataactttgtgtaatacttttctggaatagtaagttcttgttgaactgtcacaggtgagcttctaggaacacaccaggtgtggttacttccactgggtgtgtccatggtcgtggtctgtgcttttgtaaacgaacagaacacttgaaccacctcccgaattgggtcatcggcttctttacgttgatacttaagagatttgcagctctctttcaaggaaacttcccctactgaaaggcataaaaaggttaaaaaagaaaatccgagagtcccaattccctgtataacagcattaaaataatctgcctgcctggaaagatgagaacactgttgcacaacccaaaatgtgtctttaatttgtgaaaaattaccatggtgagtcagacagtcattttaaacagctgaacagagactatcatcagcaaatagagctcagctttgtagctgcctttaaaatccttgtcccaaatccggtgagctctgcttgctgccgccgcgctcctgggtgatcactcagacgggtcagtgggaataacaggccaacaagacagctttttacatgtgtccaaaggatggcctttcgaaggcctggaagtatttcactgttggaagaagtaaacaagaatgacattccagatggaaatagaattctctctcttgcctttgaccaacatggtactaaggggtttcttctttcccaatgtatgtacgtgccctgctgggggccttactttatagaatgagagcatccgagcttccctaatgaatctggctagttctgtgtctggctgaggatacaggagtgggacatccactctcggatccctcagagcacagaaaccttcagctttgctgtctctgaagtatttcctccagtttccctgcgggcccctatgtttgagtttgatggctgctggatcctcactcaacgaaaactcggttggaaactgttccgcctggcagtcctttttttgttgttttccatctcatttcccttccatctgaaagtggcattcagctgacttgctcatttagactgttcacggagtctgaatctgccaacgtggtgttggaggctccaccttgaaaagggccacagtcagggcaactttccccatacaggaaaacttgaaaattacatcaacagtctacgtcacagccaaattatatttcctttataccaaacaaaactatggagaactaaaagtacatcacacaaaacgtttatagtgttttgcatgtgacctatttcagtatttatataactagattagtgctttctagcaaacggttctgttaattagcgagtcactgttgattctgctgtggtggtaagttgataccgtgtaactaatcccgtggatgcctcctcgttatttttgtccaaacgaagcagccgtggtagtagctgtctatgattcttgctcagcaaagtaaaataaatgttaaatatgg

SEQ ID NO: 1687 - DNA, 402 bp, Homo sapiens
aaaataactttgtgtaatacttttctggaatagtaagttcttgttgaactgtcacaggtgagcttctaggaacacaccaggtgtggttacttccactgggtgtgtccatggtcgtggtctgtgcttttgtaaacgaacagaacacttgaaccacctcccgaattgggtcatcggcttctttacgttgatacttaagagatttgcagctctctttcaaggaaacttcccctactgaaaggcataaaaaggttaaaaaagaaaatccgagagtcccaattccctgtataacagcattaaaataatctgcctgcctggaaagatgaggacactgttgcacaacccaaaatgtgtctttaatttgtgaaaaattaccatggtgagtcagacagtcattttaaacag

SEQ ID NO: 1688 - DNA, 4932 bp, Homo sapiens
cagaaatgcaacaagtagtacccggggtctgcagagcgccccgcgccgcctgacttggccgggcgaagcccgcctgcagagacccgggccggcctccggacaaaggacggaggaggggctggacggcgctgcgaagtccgaaagaggccatttagcgactctggccaggctaaggggaatgcagaggagacacagagccggcgggccaagaggacgatccggccgctgcacgcagggcgggaggcgatggaggctgcccgcgccttgcgcctcctgctcgtggtgtgcggctgcctcgcgctcccgccgctgccgagcccgtgtgcccggagcgctgcgactgccagcatccccagcatctcctgtgcaccaacagggggctccgcgtagtgcccaagaccagctcgctgccgagcccccacgacgtgctcacctacagcctcggcggcaacttcataaccaacatcacggccttcgacttccaccgtctggggcagctcagacggctggacctgcagtacaaccagatccgctctctgcaccccaagaccttcgagaagctctcgcggctggaagagctgtacctggggaacaacctcttgcaggcgctcgccccgggcacgctggccccgctgcgcaagctgcgcatcctctacgccaacgggaacgagatcagccgcctaagccgcggctccttcgagggcctggagagtctagtcaagctgcggctggacgggaacgccctgggggcgctgccggacgcggtcttcgctcccttgggcaacctgctctacctacatctggagtccaaccggatccgctttctgggcaagaacgccttcgcccagctaggcaagctgcgcttcctcaacctctctgccaacgagctacagccctccctgcgccacgcggccaccttcgcaccgctgcgctccctctcctccctcatcctctcggccaacaacctgcagcacctcgggccgcgcatcttccagcacctgccacgtctcggcctgctctcgctcaggggcaaccagctcacgcacctcgcgcctgaggccttttggggcttggaggccctgcgcgagctgcgcctggagggtaatcggctgagccagctgccaactgcgctgctggagcctctgcacagcctggaggcgctggacctgagcggcaatgagctgtccgccctgcacccggccaccttcggccacctgggccggctgcgcgagctcagcctgcgcaacaacgcgctcagcgccctatccggggacatcttcgccgccagcccagccctttatcggctggatctagacggcaacggctggacctgcgactgccggctgcgaggcctgaagcgctggatgggcgactggcactcgcagggccggctcctcactgtcttcgtgcagtgtcgccaccccccggccctgcgaggcaaatacctggattacctggatgaccagcagctgcaaaatggatcctgcgcggatccctcgccctcagcttccctgaccgctgaccgcaggcggcagcccctacccacggccgcaggggaggagatgacgccacctgcaggtctcgcggaggagctgccgccgcagccgcagctccagcagcaggggcgatttctagctggggtggcctgggatggggccgccagggagctggtaggcaaccgcagcgccctaaggctgagtcggcggggcccgggcctccagcagcccagcccctccgtcgctgccgccgcgggcccggctccacagtccctagacctgcacaagaagccccagcggggccgtccgactcgggcagatcccgccctcgcggagcccaccccaacggcctctcctggctctgcgccatcgcccgccggcgacccctggcagcgcgcgacgaagcatcgtctgggcacggagcaccaggagcgtgccgcccagtccgacggtggggccgggctgccgccgctggtgtccgacccatgcgacttcaacaagttcattctgtgcaacctgacggtggaggcggtgggcgcagacagcgcctcggtgcgctgggccgtgcgcgagcaccgcagtccccggccgctgggcggcgcgcgcttccgcctgctctttgaccgctttggccagcagcccaagttccaccgcttcgtctacctgcctgagagcagcgactcggccacgctgcgcgagctgcgcggggacaccccctacctggtgtgcgtggagggcgtgcttgggggccgtgtctgccctgtggctccccgggaccactgcgcggggctggtcaccctaccggaggccgggagccggggcggcgtcgactaccagctgctgaccttggccctgctgacggtcaacgcgctgctggtgctcctggccttggcggcctgggcgtctcgctggctgcgtaggaaactgcgggctaggcggaagggcggggccccggtccacgttcggcacatgtactccacccgacggcccctgcgctccatgggcaccggcgtgtccgccgacttctcgggattccagtcgcaccggccacgcaccaccgtgtgcgcgctcagtgaggcggacctcatcgaattcccctgcgaccgcttcatggacagtgcgggcggcggcgcgggcggcagcctgagacgggaggaccgtctcctgcagcgatttgccgactaggtccagggcatatagagaccatctcattggccctaaggagccgcctctccgtgaggcccaccagcccacctcaggggaagtgccgttttgtgcacttgccagagaggccggtggggacagagggccaattcgggcaccatcccccaattcccaatactcgagaagtaaatggatggtacttggtggtcagagccagagtaggggacaaatggatggtgggatgctgaggtcggaggcttcgcttggaggctttgacacagctatgcgaatggcttttgtagcactgcaatgcagaagccaggctttgggggtagaaagggggtgcttgtgcccccaacatggccagaaatatttgggtgcatgctttttgtttgctcagtgtcaaacagagaagttttgtttctatttaaggaaggaacttattaccattacaaaggaggcttggccagggactccactggtttggtgatctctgccaagaagggggatgtaaacaggtggtaaagtttaacatacccgccaaggaactcgtttatgttggctgatagagcattcaggataccttaaagtttaataagagacgcatttttttttttcaaaaatgtgaaaagctctgacatttaacgaactgaccaatagactcaaggactgttttagttggactgggccattttattatgttccttttaatattaacagtacaagagcgcttgctgacttcgaggataactaagattacatactttctcaggagaaggctgcatgcaagacttctctgtcagggttgctcctgtggcttttttaattttatttttttaaacctatatatggaaaaggaaatttcaatgccagatttgataaaagaatgtgatgtatatgtagctgatgacccactggggaacaccagtgttccagttcacttaccacatctgtgacagtgtgtttagattggaataaatgtgatgcattacttcttatgtttttatcagtgacatggttgactgtgccctaattctcttgagttgcagttaagcaatgaaggttatttcctaatagggaagcaaaaggtgattgtcaattgatagtttaatgtttgaccacattagtgtctttatatgaaatagtagaggggaagaaattatagaaaacaaatgtgaaaaaaatacaccagtgggtatctgttctactaaaaccagaagattgttatgagtacttaaacctcactgtgaaataatgatatattttgcaattaatccctccccaactgagtgtcttactgtgttattaaatcttatcttttagttaatagttgcagtatttcttttaaatgtttttgttttaaacttaggggtaggatcctttatttgttcagttgtttccaactatttgggatactttcattccctgctatttatgaagtacatgtttatcactaagtgtagtggtttggtttacattaataattttatgtgtggtctaaaaatgcagtcactaagagaatgtacactgtggttatggtcacagtggttatggatttattggcagtggagtaccatggaggtcactgcaatggtgctaaggctgacagtggaatcttctgtttagggccttaagcccctgagggtcctggtgactcagggaatccatcacagccccgggtctttcaccccagttcactccttttatgtttggcctagattgacccatgcctgccctcttctcaacagctgagtagggaaccagccatctgaatgagctgatcgttgtttatgttcaaatgagtaaatgtccagaccacttaaaactacagctgcttttctggcagtctcgtctgcggggccaaaacttaataaaccacaggaaatagactgtcattcttagtttgctgccagggcttattttagattgagagcatactggtacatgagagcagtagtgttgtttgctcttattttcaaccagggagctatctggcaccttttgtgctcctggcttttttcaatcatagcactattgcatctcctagctatttcttttgcccagcagggtaatattgagtcccattgcaagtatggacaaggcctctggttctcctcaccacccaccttttcagccatagaacatcactgaaaatgcctaatgcctggatctgtgttctactttagtttcactgggaagtctttcagtgggagatgaataaatgttatacattgttatgtccagttatgtcaataaacccactaatagagat

SEQ ID NO: 1689 - DNA, 1009 bp, Homo sapiens
aaaaattaattaaagagaaagagaaaagcaacattttaatgccccaggaattgaaactaacgttttctgtctcggctggacccctacgcccatcttttaaacctatatatggaaaaggaaatttcaatgccagatttgataaaagaatgtgatgtatatgtagctgatgacccactggggaacaccagtgttccagttcacttaccacatctgtgacagtgtgtttagattggaataaatgtgatgcattacttcttatgtttttatcagtgacatggttgactgtgccctaattctcttgagttgcagttaagcaatgaaggttatttcctaatagggaagcaaaaggtgattgtcaattgatagtttaatgtttgaccacattagtgtctttatatgaaatagtagaggggaagaaattatagaaaacaaatgtgaaaaaaatacaccagtgggtatctgttctactaaaaccagaagattgttatgagtacttaaacctcactgtgaaataatgatatattttgcaattaatccctccccaactgagtgtcttactgtgttattaaatcttatcttttagttaatagttgcagtatttcttttaaatgtttttgttttaaacttaggggtaggatcctttatttgttcagttgtttccaactatttgggatactttcattccctgctatttatgaagtacatgtttatcactaagtgtagtggtttggtttacattaataattttatgtgtggtctaaaaatgcagtcactaagagaatgtacactgtggttatggtcacagtggttatggatttattggcagtggagtaccatggaggtcactgcaatggtgctaaggctgacagtggaatcttctgtttagggccttaagcccctgagggtcctggtgactcagggaatccatcacagccccgggtctttcaccccagttcactccttttatgtttggcctagattgacccatgcctgccctcttcaaaaacag

SEQ ID NO: 1690 - DNA, 3073 bp, Homo sapiens
gctacgcggagtgacatcgccggtgtttgcgggtggttgttgctctcggggccgtgtggagtaggtctggacctggactcacggctgcttggagcgtccgccatgaggagaagtgaggtgctggcggaggagtccatagtatgtctgcagaaagccctaaatcaccttcgggaaatatgggagctaattgggattccagaggaccagcggttacaaagaactgaggtggtaaagaagcatatcaaggaactcctggatatgatgattgctgaagaggaaagcctgaaggaaagactcatcaaaagcatatccgtctgtcagaaagagctgaacactctgtgcagcgagttacatgttgagccatttcaggaagaaggagagacaaccatcttgcaactagaaaaagatttgcgcacccaagtggaattgatgcgaaaacagaaaaaggagagaaaacaggaactgaagctacttcaagagcaagatcaagaactgtgcgaaattctttgtatgccccactatgatattgacagtgcctcagtgcccagcttagaagagctgaaccagttcaggcaacatgtgacaactttgagggaaacaaaggcttctaggcgtgaggagtttgtcagtataaagagacagatcatactgtgtatggaagaattagaccacaccccagacacaagctttgaaagagatgtggtgtgtgaagacgaagatgccttttgtttgtctttggagaatattgcaacactacaaaagttgctacggcagctggaaatgcagaaatcacaaaatgaagcagtgtgtgaggggctgcgtactcaaatccgagagctctgggacaggttgcaaatacctgaagaagaaagagaagctgtggccaccattatgtctgggtcaaaggccaaggtccggaaagcgctgcaattagaagtggatcggttggaagaactgaaaatgcaaaacatgaagaaagtgattgaggcaattcgagtggagctggttcagtactgggaccagtgcttttatagccaggagcagagacaagcttttgcccctttctgtgctgaggactacacagaaagtctgctccagctccacgatgctgagattgtgcggttaaaaaactactatgaagttcacaaggaactctttgaaggtgtccagaagtgggaagaaacctggaggcttttcttagagtttgagagaaaagcttcagatccaaatcgatttacaaaccgaggaggaaatcttctaaaagaagaaaaacaacgagccaagctccagaaaatgctgcccaagctggaagaagagttgaaggcacgaattgaattgtgggaacaggaacattcaaaggcatttatggtgaatgggcagaaattcatggagtatgtggcagaacaatgggagatgcatcgattggagaaagagagagccaagcaggaaagacaactgaagaacaaaaaacagacagagacagagatgctgtatggcagcgctcctcgaacacctagcaagcggcgaggactggctcccaatacaccgggcaaagcacgtaagctgaacactaccaccatgtccaatgctacggccaatagtagcattcggcctatctttggagggacagtctaccactcccccgtgtctcgacttcctccttctggcagcaagccagtcgctgcttccacctgttcagggaagaaaacaccccgtactggcaggcatggagccaacaaggagaacctggagctcaacggcagcatcctgagtggtgggtaccctggctcggcccccctccagcgcaacttcagcattaattctgttgccagcacctattctgagtttgcgaaggatccgtccctctctgacagttccactgttgggcttcagcgagaactttcaaaggcttccaaatctgatgctacttctggaatcctcaattcaaccaacatccagtcctgagaagccctgatcagtcaaccagctgtggcttcctgtgcctagactggacctaattatatgggggtgactttagtttttcttcagcttaggcgtgcttgaaaccttggccaggttccatgaccatgggcctaacttaaagatgtgaatgagtgttacagttgaaagcccatcataggtttagtggtcctaggagacttggttttgacttatatacatgaaaagtttatggcaagaagtgcaaattttagcatatggggcctgacttctctaccacataattctacttgctgaagcatgatcaaagcttgttttatttcaccactgtaggaaaatgattgactatgcccatccctgggggtaattttggcatgtatacctgtaactagtaattaacatcttttttgtttaggcatgttcaattaatgctgtagctatcatagctttgctcttacctgaagccttgtccccaccacacaggacagccttcctcctgaagagaatgtctttgtgtgtccgaagttgagatggcctgccctactgccaaagaggtgacaggaaggctgggagcagctttgttaaattgtgttcagttctgttacacagtgcattgccctttgttgggggtatgcatgtatgaacacacatgcttgtcggaacgctttctcggcgtttgtcccttggctctcatctcccccattcctgtgcctactttgcctgagttcttctacccccgcagttgccagccacattgggagtctgtttgttccagtgggttgagctgtctttgtcgtggagatctggaactttgcacatgtcactactggggaggtgttcctgctctagcttccacgatgaggcgccctctttacctatcctctcaatcactactcttcttgaagcactattatttattcttccgctgtctgcctgcagcagtactactgtcaacatagtgtaaatggttctcaaaagcttaccagtgtggacttggtgttagccacgctgtttactcatacagtacgtgtcctgtttttaaaatatacaattattcttaaaaataaattaaaatctgtatacttacatttcaaaaaaaaaaaaaaaaaaaaaa

SEQ ID NO: 1691 - DNA, 985 bp, Homo sapiens
ccaccattatgtctgggtcaaaggccaaggtccggaaagcgctgcaattagaagtggatcggttggaagaactgaaaatgcaaaacatgaagaaagtgattgaggcaattcgagtggagctggttcagtactgggaccagtgcttttatagccaggagcagagacaagcttttgcccctttctgtgctgaggactacacagaaagtctgctccagctccacgatgctgagattgtgcggttaaaaaactactatgaagttcacaaggaactctttgaaggtgtccagaagtgggaagaaacctggaggcttttcttagagtttgagagaaaagcttcagatccaaatcgatttacaaaccgaggaggaaatcttctaaaagaagaaaaacaacgagccaagctccagaaaatgctgcccaagctggaagaagagttgaaggcacgaattgaattgtgggaacaggaacattcaaaggcatttatggtgaatgggcagaaattcatggagtatgtggcagaacaatgggagatgcatcgattggagaaagagagagccaagcaggaaagacaactgaagaacaaaaaacagacagagacagagatgctgtatggcagcgctcctcgaacacctagcaagcggcgaggactggctcccaatacaccgggcaaagcacgtaagctgaacactaccaccatgtccaatgctacggccaatagtagcattcggcctatctttggagggacagtctaccactcccccgtgtctcgacttcctccttctggcagcaagccagtcgctgcttccacctgttcagggaagaaaacaccccgtactggcaggcatggagccaacaaggagaacctggagctcaacggcagcatcctgagtgcgagaactttcaaaggcttccaaatctgatgctacttctggaatcctcaattcaaccaacatccagtcctgagaagccctgatcagtcaaacag

SEQ ID NO: 1692 - DNA, 424 bp, Homo sapiens
accaaattgagattaaattgaagaaaagcaagcaaattaatttcagcttgattatcaacctgtatcaagaacaaaaatgggaggaggtgtccacatttatggtgtgtataggtaacatggggaaaatgctattctgtgttttggaaaagaagaaatagtgccgtcctatttatttctatatttagaaatttttctcaaagaaatttcaattgtatctatgagatgggtttctaagtatcttattgtgtgttataagtgccttttaatatcatactaagtgtgagcttctggacattttcaagagcttacaaaaactaagtggcattgtatttttataaccccattgagaagactaagtaagaaatgaaatgtcctatcaattttattttgtcatgcttcaaacaataaagacatttctgcttca

SEQ ID NO: 1693 - DNA, 2268 bp, Homo sapiens
tcgtttcctcccctcccctccactcggccgtccctccttcctcctccctcctccctcctcctcccgctcctgaagagcgcgccgcgtgggggacggcccggttacttcctccagagactgacgagtgcggtgtcgctccagctcagagctcccggagccgcccggccagcgtccggcctccctgatcgtctctggccggcgccctcgccctcgcccggcgcgcaccgagcagccgcgggcgccgagcagccaccgtcccgaccaagcgccggccctgcccgcagcggcaggatgaatgatttcggaatcaagaatatggaccaggtagcccctgtggctaacagttacagagggacactcaagcgccagccagcctttgacacctttgatgggtccctgtttgctgtttttccttctctaaatgaagagcaaacactgcaagaagtgccaacaggcttggattccatttctcatgactccgccaactgtgaattgcctttgttaaccccgtgcagcaaggctgtgatgagtcaagccttaaaagctaccttcagtggcttcaaaaaggaacagcggcgcctgggcattccaaagaacccctggctgtggagtgagcaacaggtatgccagtggcttctctgggccaccaatgagttcagtctggtgaacgtgaatctgcagaggttcggcatgaatggccagatgctgtgtaaccttggcaaggaacgctttctggagctggcacctgactttgtgggtgacattctctgggaacatctggagcaaatgatcaaagaaaaccaagaaaagacagaagatcaatatgaagaaaattcacacctcacctccgttcctcattggattaacagcaatacattaggttttggcacagagcaggcgccctatggaatgcagacacagaattaccccaaaggcggcctcctggacagcatgtgtccggcctccacacccagcgtactcagctctgagcaggagtttcagatgttccccaagtctcggctcagctccgtcagcgtcacctactgctctgtcagtcaggacttcccaggcagcaacttgaatttgctcaccaacaattctgggactcccaaagaccacgactcccctgagaacggtgcggacagcttcgagagctcagactccctcctccagtcctggaacagccagtcgtccttgctggatgtgcaacgggttccttccttcgagagcttcgaagatgactgcagccagtctctctgcctcaataagccaaccatgtctttcaaggattacatccaagagaggagtgacccagtggagcaaggcaaaccagttatacctgcagctgtgctggccggcttcacaggaagtggacctattcagctgtggcagtttctcctggagctgctatcagacaaatcctgccagtcattcatcagctggactggagacggatgggagtttaagctcgccgaccccgatgaggtggcccgccggtggggaaagaggaaaaataagcccaagatgaactacgagaagctgagccggggcttacgctactattacgacaagaacatcatccacaagacgtcggggaagcgctacgtgtaccgcttcgtgtgcgacctccagaacttgctggggttcacgcccgaggaactgcacgccatcctgggcgtccagcccgacacggaggactgaggtcgccgggaccaccctgagccggccccaggctcgtggactgagtgggaagcccatcctgaccagctgctccgaggacccaggaaaggcaggattgaaaatgtccaggaaagtggccaagaagcagtggccttattgcatcccaaaccacgcctcttgaccaggctgcctcccttgtggcagcaacggcacagctaattctactcacagtgcttttaagtgaaaatggtcgagaaagaggcaccaggaagccgtcctggcgcctggcagtccgtgggacgggatggttctggctgtttgagattctcaaaggagcgagcatgtcgtggacacacacagactatttttagattttcttttgccttttgcaaccaggaacagcaaatgcaaaaactctttgagagggtaggagggtgggaaggaaacaaccatgtcatttcagaagttagtttgtatatattattataatcttataattgttctcagaatcccttaacagttgtatttaacagaaattgtatattgtaatttaaaataattatataactgtatttgaaataagaattc

SEQ ID NO: 1694 - DNA, 384 bp, Homo sapiens
ctgcaggtataactggtttgccttgctccaccgggtcactcctctcttggatgtaatccttgaaagacatggttggcttattgaggcagagagactggctgcagtcatcttcgaagctctcgaaggaaggaacccgttgcacatccagcaaggacgactggctgttccaggactggaggagggagtctgagctctcgaagctgtccgcaccgttctcaggggagtcgtggtctttgggcgtcccagaattgttggtgagcaaattcaagttgctgcctgggaagtcctgactgacagagcagtaggtgacgctgacggagctgagccgagacttggggaacatctgaaactcctgctcagagctgagtacgctgggtgtggagg

SEQ ID NO: 1695 - DNA, 581 bp, Homo sapiens
  misc_feature 556: n = A,T,C or G
cctgctgggctwggcracgagggactcggcctcggaggcgacccagaccacacagacactgggtcaaggagtaagcagaggataaacaactggaaggagagcaagcacaaagtcatcatggcttcagcgtctgctcstggaaaccaagataaagatgcccattttccaccaccaagcaagcagagcctgttgttttgtccaaaatcaaaactgcacatccacagagcagagatctcaaagattatgcgagaatgtcaggaagaaagtttctggaagagagctctgcctttttctcttgtaagcatgcttgtcacccagggactagtctaccaaggttatttggcagctaattctagatttggatcattgcccaaagttgcacttgctggtctcttgggatttggccttggaaaggtatcatacataggagtatgccagagtaaattccatttttttgaagatcagctccgtggggctggttttggtccacagcataacaggcactgcctccttacctgtgaggaatgcaaaataaagcatggattaaagtgagaanggagactctcagccttcagcttcct

SEQ ID NO: 1696 - DNA, 3100 bp, Homo sapiens
ggtgggagccgccgtgtgtggagaagctgctgccggtgtcatggcggagctgagtgaggaggcgctgctgtcagtattaccgacgatccgggtccctaaggctggagaccgggtccacaaagacgagtgcgccttctccttcgacacgccggagtctgaggggggcctctacatctgtatgaacacgtttctgggctttgggaaacagtatgtggagagacatttcaataagaccggccagcgagtctacttgcacctccggcggacccggcgcccgaaagaggaggaccctgctacaggcactggagacccaccccggaagaagcccacgcggctggctattggtgttgaaggcggatttgaccttagcgaggagaagtttgaattagacgaggatgtgaagattgtcattttgccagattacctggagattgcccgggatggactggggggactgcctgacattgtcagagatcgggtgaccagtgcagtggaggccctactgtcggccgactcagcctcccgcaagcaggaggtgcaggcatgggatggggaagtacggcaggtgtctaagcatgccttcagcctcaagcagttggacaaccctgctcgaatccctccctgtggctggaagtgctccaagtgtgacatgagagagaacctgtggctcaacctgactgatggctccatcctctgtgggcgacgctacttcgatggcagtgggggcaacaaccacgctgtggagcactaccgagagacaggctacccgttagctgtcaagctgggcaccatcacccctgatggagctgacgtgtactcatatgatgaggatgacatggtcctggaccccagcctggctgagcacctgtcccacttcggcatcgacatgctgaagatgcagaagacagacaagacgatgactgagttggagatagacatgaaccagcggattggtgaatgggagctgatccaggagtcaggtgtgccactcaagcccctgtttgggcctggctacacaggcatccggaacctgggtaacagctgctacctcaactctgtggtccaggtgctcttcagcatccctgacttccagaggaagtatgtggataagctggagaagatcttccagaatgccccgacggaccctacccaggatttcagcacccaggtggccaagctgggccatggccttctctccggggagtattccaagccagtaccggagtcgggcgatggggagcgggtgccagaacagaaggaagttcaagatggcattgcccctcggatgttcaaggccctcatcggcaagggccaccctgaattctccaccaaccggcagcaggatgcccaggagttcttccttcaccttatcaacatggtggagaggaattgccggagctctgaaaatcctaatgaagtgttccgcttcttggtggaggaaaagatcaagtgcctggccacagagaaggtgaagtacacccagcgagttgactacatcatgcagctgcctgtgcccatggatgcagcccttaacaaagaggagcttctggagtacgaggagaagaagcggcaagccgaagaggagaagatggcactgccagaactggttcgggcccaggtgcccttcagctcttgcctggaggcctacggggcccctgagcaggtcgatgacttctggagcacggccctgcaggccaagtcagtagctgtcaagaccacacgatttgcctcattccctgactacctggtcatccagatcaagaagttcaccttcggcttagactgggtgcccaagaaactggatgtgtccatcgagatgccagaggagctcgacatctcccagttgaggggcacagggctgcagcccggagaggaggagctgccagacattgccccacccctggtcactccggatgagcccaaagcgcccatgctggatgaatcagtcatcatccagctggtggagatgggattccctatggacgcctgccgcaaagctgtctactacacgggcaacagcggggctgaggccgccatgaactgggtcatgtcacacatggatgatccagattttgcaaaccccctcatcctgcctggctctagtgggccgggctccacaagcgcagcagccgacccccctcctgaggactgtgtgaccaccattgtctccatgggcttctcccgggaccaggccttgaaagcgctgcgggccacgaacaatagtttagaacgggctgtggactggatcttcagtcacattgacgacctggatgctgaagctgccatggacatctcagagggccgctcagctgccgactccatctctgagtctgtgccagtgggacctaaagtccgggatggtcctggaaagtatcagctctttgccttcattagtcacatgggcacctctaccatgtgtggtcactacgtctgccacatcaagaaagaaggcagatgggtgatctacaatgaccagaaagtgtgtgcctccgagaagccgcccaaggacctgggctacatctacttctaccagagagtggccagctaagagcctgcctcaccccttaccaatgagggcaggggaagaccacctggcatgagggagaggggctgagggatggacttcagcccctctgctctgtaccctttttccttttgtccccggcagcagggaagaagctggaggccgtgggagaatggctgggcagagcagaggggcagcgatagactctggggatggagcaggacggggacgggaggggccggccacctgtctgtaaggagactttgttgcttcccctgcccccggaatccacagtgctctgcttctctgtgtcgccccgcccagccccctggtgtggagggaggggtctcgtttgtgcgcgtgggtgtagctttgtgcatcctctcccagtggagcgatcacctgtgcctcccctccccctttgtttgcccctgtgtggttggtcaaggagggatgtgagggaaatagggaccccccgacttgccctcctgcctcagtctttcccccaccctgtctcttccttgtccttctctggaaaatgccaaaatacacgatgtgaataaaagtacaacggct

SEQ ID NO: 1697 - DNA, 200 bp, Homo sapiens
ctgggagatgtcgagctcctctggcatctcgatggacacatccagtttcttgggcacccagtctaagccgaaggtgaacttcttgatctggatgaccaggtagtcagggaatgaggcaaatcgtgtggtcttgacagctactgacttggcctgcagggccgtgctccagaagtcatcgacctgctcaggggccccgtagg

SEQ ID NO: 1698 - DNA, 462 bp, Homo sapiens
cctgacattcctgccttcttatattaataagamaaataaaacaaaatagtgttgaagtgttggggcrgcgaaaatttttggggggtggtatggagagakaatgggcgatgtttctcagggctgcttcaagcgggattaggggcggcgtgggaacctagagtgggagagattaagctgaagggaggtcttgtggtaaggggtgatattrtggggatgttagaagaaacatttgtcgtatagaatgattggtgatggcctggatacggttttgkatgaattgagaarctaaatggaataagcagaaggagaraaacaggtataaaaggtctaagaattgggaggacctaggayatctgattagagagtgcctaaggagattcrgcatagtcctgccagcaaagattatttatttacttcaagagttwagagtggcagtttggggatagcaccaggagatatcag

SEQ ID NO: 1699 - DNA, 1752 bp, Homo sapiens
ccgctccttctaggatctccgcctggttcggcccgcctgcctccactcctgcctctaccatgtccatcagggtgacccagaagtcctacaaggtgtccacctctggcccccgggccttcagcagccgctcctacacgagtgggcccggttcccgcatcagctcctcgagcttctcccgagtgggcagcagcaactttcgcggtggcctgggcggcggctatggtggggccagcggcatgggaggcatcaccgcagttacggtcaaccagagcctgctgagcccccttgtcctggaggtggaccccaacatccaggccgtgcgcacccaggagaaggagcagatcaagaccctcaacaacaagtttgcctccttcatagacaaggtacggttcctggagcagcagaacaagatgctggagaccaagtggagcctcctgcagcagcagaagacggctcgaagcaacatggacaacatgttcgagagctacatcaacaaccttaggcggcagctggagactctgggccaggagaagctgaagctggaggcggagcttggcaacatgcaggggctggtggaggacttcaagaacaagtatgaggatgagatcaataagcgtacagagatggagaacgaatttgtcctcatcaagaaggatgtggatgaagcttacatgaacaaggtagagctggagtctcgcctggaagggctgaccgacgagatcaacttcctcaggcagctatatgaagaggagatccgggagctgcagtcccagatctcggacacatctgtggtgctgtccatggacaacagccgctccctggacatggacagcatcattgctgaggtcaaggcacagtacgaggatattgccaaccgcagccgggctgaggctgagagcatgtaccagatcaagtatgaggagctgcagagcctggctgggaagcacggggatgacctgcggcgcacaaagactgagatctctgagatgaaccggaacatcagccggctccaggctgagattgagggcctcaaaggccagagggcttccctggaggccgccattgcagatgccgagcagcgtggagagctggccattaaggatgccaacgccaagttgtccgagctggaggccgccctgcagcgggccaagcaggacatggcgcggcagctgcgtgagtaccaggagctgatgaacgtcaagctggccctggacatcgagatcgccacctacaggaagctgctggagggcgaggagagccggctggagtctgggatgcagaacatgagtattcatacgaagaccaccagcggctatgcaggtggtctgagctcggcctatgggggcctcacaagccccggcctcagctacagcctgggctccagctttggctctggcgcgggctccagctccttcagccgcaccagctcctccagggccgtggttgtgaagaagatcgagacacgtgatgggaagctggtgtctgagtcctctgacgtcctgcccaagtgaacagctgcggcagcccctcccagcctacccctcctgcgctgccccagagcctgggaaggaggccgctatgcagggtagcactgggaacaggagacccacctgaggctcagccctagccctcagcccacctggggagtttactacctggggaccccccttgcccatgcctccagctacaaaacaattcaattgctttttttttttggtccaaaataaaacctcagctagctctgccaatgtc

SEQ ID NO: 1700 - DNA, 228 bp, Homo sapiens; identical to SEQ ID NO: 229

SEQ ID NO: 1701 - DNA, 515 bp, Homo sapiens
ggcacgaggagctggcctccggggcaccgaccgctataaggccagtcggactgcgacacagcccatcccctcgaccgctcgcgtcgcatttggccgcctccctaccgctccaagcccagccctcagccatggcatgccccctggatcaggccattggcctcctcgtggccatcttccacaagtactccggcagggagggtgacaagcacaccctgagcaagaaggagctgaaggagctgatccagaaggagctcaccattggctcgaagctgcaggatgctgaaattgcaaggctgatggaagacttggaccggaacaaggaccaggaggtgaacttccaggagtatgtcaccttcctgggggccttggctttgatctacaatgaagccctcaagggctgaaaataaatagggaagatggagacaccctctgggggtcctctctgagtcaaatccagtggtgggtaattgtacaataaattttttttggtcaaatttaaaaaaaaaaaaaaaaaa

SEQ ID NO: 1702 - DNA, 329 bp, Homo sapiens; identical to SEQ ID NO: 464

SEQ ID NO: 1703 - DNA, 1022 bp, Homo sapiens
cacccccacctgccagagctgatcctccctaggccctgcctaaccttgagttggcccccaatccctctggctgcagaagtccccttacccccaatgagaggaggggcaggaccagatcttttgagagctgagggttgagggcattgagccaacacacagatttgtcgcctctgtccccgaagacacctgcaccctccatgcggagccaagatggggaatggaactgaggaagattataactttgtcttcaaggtggtgctgatcggcgaatcaggtgtggggaagaccaatctactctcccgattcacgcgcaatgagttcagccacgacagccgcaccaccatcggggttgagttctccacccgcactgtgatgttgggcaccgctgctgtcaaggctcagatctgggacacagctggcctggagcggtaccgagccatcacctcggcgtactatcgtggtgcagtgggggccctcctggtgtttgacctaaccaagcaccagacctatgctgtggtggagcgatggctgaaggagctctatgaccatgctgaagccacgatcgtcgtcatgctcgtgggtaacaaaagtgacctcagccaggcccgggaagtgcccactgaggaggcccgaatgttcgctgaaaacaatggactgctcttcctggagacctcagccctggactctaccaatgttgagctagcctttgagactgtcctgaaagaaatctttgcgaaggtgtccaagcagagacagaacagcatccggaccaatgccatcactctgggcagtgcccaggctggacaggagcctggccctggggagaagagggcctgttgcatcagcctctgaccttggccagcaccacctgcccccactggctttttggtgccccttgtccccacttcagccccaggacctttccttgccctttggttccagatatcagactgttccctgttcacagcaccctcagggtcttaaggtcttcatgccctatcacaaatacctcttttatctgt

SEQ ID NO: 1704 - DNA, 439 bp, Homo sapiens
ctgaggaagattataactttgtcttcaagggtactatcgtggtgcagtgggggccctcctggtgtttgacctaaccaagcaccagacctatgctgtggtggagcgatggctgaaggagctctatgaccatgctgaagccacgatcgtcgtcatgctcgtgggtaacaaaagtgacctcagccaggcccgggaagtgcccactgaggaggcccgaatgttcgctgaaaacaatggactgctcttcccggagacctcagccctggactctaccaatgttgagctagcctttgagactgtcctgaaagaaatctttgcgaaggtgtccaagcagagacagaacagcatccggaccaatgccatcactctgggcagtgcccaggctggacaggagcctggccctggggagaagagggcctgttgcatcagcctmtgaccttgg

SEQ ID NO: 1705 - DNA, 319 bp, Homo sapiens
  misc_feature 224, 258, 294, 296, 304: n = A,T,C or G
tcaaaacctcactatttaatggagtgcctttgtctctacttgaattgcgttttttccttgagacccagtgaagggaatcccccatcccagggtgtttttctttccgatcttttcccagcaggaacctttaaaagcttcctccagtggaatgccttaggggtcctcccatttctgagacagaaacatggttgatctcccttactctcctgcaatttatggcttgntccacacatgagaaatgactcacatttcctttgngcagtcagcaacagatttatgcatttccctttttgntntcatcctnttatcttgacttcca

SEQ ID NO: 1706 - DNA, 318 bp, Homo sapiens
  misc_feature 207, 224, 229: n = A,T,C or G
tcaaaacctcactatttaatggagtgcctttgtctctacttgaattgcgttttttccttgagacccagtgcagggaatcccccatcccagggtgtttttctttccgatcttttcccagcaggaacctttaaaagcttcctccagtggaatgccttaggggtcctcccatttctgagacagaaacatggttgatctcccttactctcntgcaatttatggcttgntccanacatgagaaatgactcacatttcctttgggcagtcagcagcagatttatgcatttccctttttgttctcatcctcttatcttgacttcc

SEQ ID NO: 1707 - DNA, 307 bp, Homo sapiens
  misc_feature 160, 210, 231, 240, 241, 252, 285: n = A,T,C or G
atggtgacatagtgggggatggcgtggtccaggccccgctcacacctgagagaggaaaaccaaagtcattcttctcaaaagcaaagttttggctaaaagacatctacttatctggaagtcaagataagaggatgagaacaaaaagggaaatgcataaatntgctgctgactgcccaaaggaaatgtgagtcatttctcatgtctggaacnagccatgaattgcaggaaaanaagggaaannaaccatgtttntgtctcagaaatgggaggacccctaaggcattncactggaggaagcttttaaagg

SEQ ID NO: 1708 - DNA, 484 bp, Homo sapiens
  misc_feature 210, 216, 441, 481: n = A,T,C or G
atcttgtaaggcaaatgattagcacacggcaggctcttcgtccgtttgcaagttgctgtttgtttccagctacaccagtcagagctccacagagagggtgcgttcctggttctcaggtgggcaggtgctatggtgcggggcgctggaaagaatggggttgaattggccctcgcctccgcttgtttgagactctcgttagaaagggcttangaaaancaagggaatggcagccaccccatcaccatcgagaacaggcagacgtttcccgagtaggggccaaagccactggaaaccgtgttccctgtgcagtccgactgacactaccccatgcctggggggaatgagtataaaaagggaaatgtttttgaagacaggcacgatatatactactagagaatgcgcagtttcaaaccacagttgcaggaggatataggaataacnacaggtgccggggactacgtacatcttggatagtcgacgncgg

SEQ ID NO: 1709 - DNA, 1168 bp, Homo sapiens
ggccgggagagtagcagtgccttggaccccaggtgagctggcctctcaggctccatctggcctgagcaccctgccccagcgagtcctccggaaagagcctgtcaccccatctgcacttgtcctcatgagccgctccaatgtccagcccacagctgcccctggccagaaggtgatggagaatagcagtgggacacccgacatcttaacgcggcacttcacaattgatgactttgagattgggcgtcctctgggcaaaggcaagtttggaaacgtgtacttggctcgggagaagaaaagccatttcatcgtggcgctcaaggtcctcttcaagtcccagatagagaaggagggcgtggagcatcagctgcgcagagagatcgaaatccaggcccacctgcaccatcccaacatcctgcgtctctacaactatttttatgaccggaggaggatctacttgattctagagtatgccccccgcggggagctctacaaggagctgcagaagagctgcacatttgacgagcagcgaacagccacgatcatggaggagttggcagatgctctaatgtactgccatgggaagaaggtgattcacagagacataaagccagaaaatctgctcttagggctcaagggagagctgaagattgctgacttcggctggtctgtgcatgcgccctccctgaggaggaagacaatgtgtggcaccctggactacctgcccccagagatgattgaggggcgcatgcacaatgagaaggtggatctgtggtgcattggagtgctttgctatgagctgctggtggggaacccaccctttgagagtgcatcacacaacgagacctatcgccgcatcgtcaaggtggacctaaagttccccgcttccgtgcccatgggagcccaggacctcatctccaaactgctcaggcataacccctcggaacggctgcccctggcccaggtctcagcccacccttgggtccgggccaactctcggagggtgctgcctccctctgcccttcaatctgtcgcctgatggtccctgtcattcactcgggtgcgtgtgtttgtatgtctgtgtatgtataggggaaagaagggatccctaactgttcccttatctgtaatctacctcctcctttgtttaataaaggctgaagctttttgt

SEQ ID NO: 1710 - DNA, 424 bp, Homo sapiens
  misc_feature 286, 304, 310, 317: n = A,T,C or G
tgccatgggaagaaggtgattcacagagacataaagccagaaaatctgctcttagggctcaagggagagctgaagattgctgacttcggctggtctgtgcatgcgccctccctgaggaggaagacaatgtgtggcaccctggactacctgcccccagagatgattgaggggcgcatgcacagtgagaaggtggatctgtggtgcattggagtgctttgctatgagctgctggtggggaacccaccctttgagagtgcatcacacaacgagacctatcgccgcatcntcaaggtggacctaaagntccccncttccgngcccatgggagcccaggacctcatctccaaactgctcaggcataacccctgggaacggctgcccctggcccaggtctcagcccacccttgggtccgggccaactctc

SEQ ID NO: 1711 - DNA, 2302 bp, Homo sapiens
gtgactgtggagtttgaattgggtggcggttgactgtagagccgctctctctcactggcacagcgaggttttgctcagcccttgtctcgggaccgcagcctccgccgagcgccatggctcctaggaagggcagtagtcgggtggccaagaccaactccttacggaggcggaagctcgcctcctttctgaaagacttcgaccgtgaagtggaaatacgaatcaagcaaattgagtcagacaggcagaacctcctcaaggaggtggataacctctacaacatcgagatcctgcggctccccaaggctctgcgcgagatgaactggcttgactacttcgcccttggaggaaacaaacaggccctggaagaggcggcaacagctgacctggatatcaccgaaataaacaaactaacagcagaagctattcagacacccctgaaatctgccaaaacacgaaaggtaatacaggtagatgaaatgatagtggaagaggaagaagaagaagaaaatgaacgtaagaatcttcaaactgcaagagtcaaaaggtgtcctccatccaagaagagaactcagtccatacaaggaaaaggaaaagggaaaaggtcaagccgtgctaacactgttaccccagccgtgggccgattggaggtgtccatggtcaaaccaactccaggcctgacacccaggtttgactcaagggtcttcaagacccctggcctgcgtactccagcagcaggagagcggatttacaacatctcagggaatggcagccctcttgctgacagcaaagagatcttcctcactgtgccagtgggcggcggagagagcctgcgattattggccagtgacttgcagaggcacagtattgcccagctggatccagaggccttgggaaacattaagaagctctccaaccgtctcgcccaaatctgcagcagcatacggacccacaaatgagacaccaaagttgacaggatggacttttaatgggcacttctgggaccctgaagagacttcttcccttcaggcttattgtttgagtgtgaagttccagagcaaggagccatgttcctctaagggaattcaggaattcagacgtgctagtcccacaccagttaggtagagctgtctgttcaccctcccatcccagctgatcccagtcactgcttgctggggccatgccatggaagcttcccatcagtctcccagctgaatcctccctgctctctgagctgctgccttttgcctcctgcaactcaacatcctcttcaccctgccctgcctgcagttgagggggcgaagaagaaccctgtgttctcaggaagactgcctccaccaccgctacccagagaacctctgcatctggcatttctgctctctatgcttgagaccgggaggtttaggctcagataagtgagctctgggccatgagagggtaggtccagaaggtggggggaactgtacagatcagcagagcaggacagttggcagcagtgacctcagtagggaacatgtccgtctaccctctcgcactcatgacacctccccctaccagccctcctcttcctcctcctcctcctcctgtgggaggtggtcagtgggacttagggatctttcacctgctgtgcccagtagttctgaagtctgcttgtggagcagtgttttatgtttatccctgtttactgaagaccaaatactggtttggagacaacttccatgtcttgctcttctacctccctagttagtggaaatttggataagggaactgtagggcccagattctggaggttttatgtcattggccacagaataactgtctctaagctatccatggtccagtggtccctgccaagtctgtagacttcagagagcacttctctcttatggggttcatgggaacaggggtgggtgtgacttgcttggtggcctcattccatgtgtgcctgtgcctggggcatggactttgttaagcagagtcagcagtgaggtcctcattctccagccagcctctctgccctggagaatcatgtgctatgttctaagaatttgagaactagagtcctcatccccaggcttgaaggcacatggctttctcatgtagggctctctgtggtatttgttattattttgcaacaagaccattttagtaaaacagtcctgttcaagttgtattcttttaagttcttttattctcctttccctgagatttttgtatatattgttctgagtaatggtatctttgagctgattgttctaatcagagctggtacctactttcaataaattctggttttgtgttttct

SEQ ID NO: 1712 - DNA, 349 bp, Homo sapiens
  misc_feature 329: n = A,T,C or G
tccagcagcaggagagcggatttacaacatctcagggaatggcagccctcttgctgacagcaaagagatcttcctcactgtgccagtgggcggcggagagagcctgcgattattggccagtgacttgcagaggcacagtattgcccagctggatccagaggccttgggaaacattaagaagctctccaaccgtctcgcccaaatctgcagcagcatacggacccacaaatgagacaccaaagttgacaggatggacttttaatgggcacttctgggaccctgaagagacttcttcccttcaggcttattgtttgagtgtgaagttccanagcaaggagccatgttcctc

SEQ ID NO: 1713 - DNA, 396 bp, Homo sapiens
  misc_feature 253, 325, 330, 337, 365, 387: n = A,T,C or G
ttaaaaaaggaacaacaaaaaactagggttgtagaattataaaactgcttcaaccttagaaccttaagtaggaggccctcaaatggacttacgttagtccttagggagtcaatgcgtgtgttgctgcttatttaaatacagttcagttggagccccgagagtgccaatgttttccccacacctcttggatgccttcctcttcccaaaccccagaagaggtgggcacctgagcggggaatctcaggtgacttantttgccagtgcctactctattgaagaactgggttttcatgctcgagaagaaactcgtggaagggcgtgtttnccatnacaggtncacatgctgattgcttttgttgaatttncttggtgcgacttatgccaagnaattatgac

SEQ ID NO: 1714 - DNA, 5791 bp, Homo sapiens
gggaagagcacacacaatgaagaccaagccagctgtgaggtgctcactgtgaagaagaaggcaggggccgtgacctcaaccccaaacaggaactcatccaagagacggtcctcccttcccaatggggaagggctgcagctgaaggagaactcggaatccgagggtgtttcctgccactattggtcgctgtttgacgggcacgcggggtccggggccgcggtggtggcgtcacgcctgctgcagcaccacatcacggagcagctgcaggacatcgtggacatcctgaagaactccgccgtcctgccccctacctgcctgggggaggagcctgagaacacgcccgccaacagccggactctgacccgggcagcctccctgcgcggaggggtgggggccccgggctcccccagcacgccccccacacgcttctttaccgagaagaagattccccatgagtgcctggtcatcggagcgcttgaaagtgcattcaaggaaatggacctacagatagaacgagagaggagttcatataatatatctggtggctgcacggccctcattgtgatttgccttttggggaagctgtatgttgcaaatgctggggatagcagggccataatcatcagaaatggagaaattatccccatgtcttcagaatttacccccgagacggagcgccagcgacttcagtacctggcattcatgcagcctcacttgctgggaaatgagttcacacatttggagtttccaaggagagtacagagaaaggagcttggaaagaagatgctctacagggactttaatatgacaggctgggcatacaaaaccattgaggatgaggacttgaagttcccccttatatatggagaaggcaagaaggcccgggtaatggcaactattggagtgaccaggggacttggggaccatgacctgaaggtgcatgactccaacatctacattaaaccattcctgtcttcagctccagaggtaagaatctacgatctttcaaaatatgatcatggatcagatgatgtgctgatcttggccactgatggactctgggacgttttatcaaatgaagaagtagcagaagcaatcactcagtttcttcctaactgtgatccagatgatcctcacaggtacacactggcagctcaggacctggtgatgcgtgcccggggtgtgctgaaggacagaggatggcggatatctaatgaccgactgggctcaggagacgacatttctgtatatgtcattcctttaatacatggaaacaagctgtcatgaaaatggcccaggggattgggaggacagaggggaagaaagctgggatgcctcttggcaggacggaactgggaagtgccccagctgagttccaagtgatgcagtctcttcccagcccaagcggggagttcatggccaaaagactatgcttcaagatgaccctttggtttccatttcttctttagtaacaggtcaactcaacaagagcaaaacacaaaggctgctaccaagtgttgttgtatttcagttcctttcataggcctccgaggtggccattgactatttggggtatatatgtcatatttattttatctagagtagctggggcagccattttcaggtgtaaatggcagaggactcttcagcctgtcaagctgccagcttatctacgggttaaaaagtgctgcattggaaagtagggggtcatgcctcaaaatgtaagtaagtgcccaccttctaggaagcctgaggtttatttcagggattgccgtctgccccccgccccccttctctttttttcttctctgtttctattcttttatggcagtggtggagtgaggcagggattttttttttttttttttcgtgtttttgacattccttgaatctgttttttattccccttccacagaacaggcctgggactttccaacaccctgctaaggaagttctgtgtccaagtcccacccaggctgggttgtccccacctcctccagcccacacagcccaggcagcatccgggccagtgccctgcatgacagagggtctttgttgtgtaatgtttgttcccaagttgcattttctaaccgaatcagtgtgttttcatgaaactgagtgtttctgtggaccagtagttcctctgttgtcttcagtggtcttcctgtgtggctcaagggttctctgtgagagtctggattttcatttctggaatggctggccccatcccacttttctgtatcatggggacacatataaagcagtgtttaatagagcagtttaagaagttgcttgcatctgttggttcaccatggctcatctggggaccattttggattcatgtttcatggcttgtgactgtccccaagcccactccaaacaaagtgtaaggatcagagttctgtcaaggagcagcagttctgctctccccatcatctttgtgcaaggcccctcggggggcactttaataaaagaatttgaaatgggttgactggccattctcatgctgtgctccctgtctcttctcttctctaaagaatcatgtcccagctcctcaaggtccctctatggttccacatctgagtgttcgccacaagagcagcagcagcaggcacagtgcatgccatatctacctgctgcttctctgctgggaggaatggccaagtagattataaaactcacttctgtctcttaggcagacttgtacggccacaaaattacctagtcttcttcctgctgagctactgaggtattgccaccattttgacaactttgagtaattaaaacactcttctgacccaaaaaggaaaaaaggtcactgacgtgacccccccagcatgctagagagctaattccagttctcatatttgtttgaatttcttcccagaggagaggataggaacctctcctccagggcagtaaatcacctgcatttctggagttgtcggtattgtattcgaaaaggcctggagcccctcctgctcaggaaagaactcattccagggtgtggagacagtgccgtctggcaggtgaaatactgtgggaattcacgccaccaggtgtttgtgcaagtgttggcctgggaagaatgggacttcggccttgtcaggagttgtcttcatctgcagcacgtttcttcctcctgcagtagatcttagctaccccagatatctctatggagagaagtttgtggaaaatgctttgcttcgtggcagagtctgatgctgtaggaaaaccttcgggcatgtgacagcagtgtggtccactccctgttctgccctggcgctcagagtcatgtgtaagtaggaaacctgagcaagtcttccgtggaggaccctgagctgccgtctttgggatccttcctgtgtccccaccgtctttcatttatttgctttcctgggcctctatctgggccctaccttgagcttctccagttttattcaagccaccagagtaagaatttgggtgtagatgtcacaactaccttctactcaattcaccaattcatttactgctatggcacgtctcaggaataactctagaaacctctaaatcgaaatattataaaatcttgagcacttagtcctgctggttttagttagaaaggcatccaggaattgttttcctacgcccccttgagtggaaagatcttagttagaagataaagtcaagtttgtgttcaggggatgggaggaagactataaataagatgaagaaatcaaaagtaggaaacatgatgtaaacgaagcatggcagatctgtccagcactgatattgctctataaattgagcttactcagttttggccttatttttttacccaggccccatgtcacccagtcctaaaacagtaaccgtgtctacataacgggttggcccctggtgcatccctggaaaagtcaaaggacgcacacttcgaaattctgcagaacgtatttatacatggttcagaaatcttgcgtatctgacttatagccaaatctgcttgctcgaatagcctcagaggaagtcttgtttaataaaaaccttttgatttcctagtcaagtctttatggttgtctcgaggggtgtgtggctactttaatgaaaggctttcctgctctaaatctctttgctgggctgggcctcttcagactatctggtgaaactcctttccttagaacaaactcagtccgtccatgctctgtggcattttgctagatgataaccaaagccttattcctgtagccagtgtcagcagtcagagaggtggagggtgtgttctgctgtggttatgcatacctatctgctgttcttgaggtgtaaaaggaaaggtgaaaatcgggccaggccaagtactcagctgtcttaataggatgaagccttaagcagtggaaatttcagttattttccacagtattccattttggaggatttggggtgtttactttttaaattcttgaacaacttaacctccatgaggctttgtgaagtcagctgtgaccaccctcctcttactgtgttctcagtattcattcacttccagggaagaatgacagccacagggagatggtggtgggcaagaatgagagtcccaggatccagatttagcctcagatcttccccattcaggaagggttttccatttaacaagagcactagtatgaaaacattagggacaaatctcccatgtctttgaaattcggattctcctcttgagatccccttcctcacctgccaatcaactttataaggccacaagtggtcactggttttccttccacaggtttgaggttctcagctttccttaagcgacccagcagctccgctgttttcagagtgaatatgttaagctttgatgagattctattttcagtaagttagtgcttctgggacacttggagaaagctgtgagagtcattgtctacgcaaagaacaacgaagctgatcctaaaagtgatccaatctaagaaaatggtaaaacgagctctggccacagcacagaattttatgtgaggaactcagatttttgaagacttaacaattgcagagaaaggttgcagcctgcacaccatagcccacctctctgagcagactttggttttgtgtggtgacgtggcacatgtttgtacactgggatttttcaaaggacgctacgcgagcagactgacttgcctcttctgtgagcactgtggcttttgtcagatggagtgccggtctgcagaggactgctctttcgaatccacagtgttatctgtgtaaatagctttaatttttcttctgtgtcttaggtgaagttttgttcatgtagcaaccaggtagacagtgaccaaataaggctgtaaatgtgctgtagttttctactgtgatgtacttgaaggagaacctgtgtcctctacttttctgatctcccacaagtattttgtgtttgtttcctgagtcctgaggttattattttactcctgttttgcccccagttttctttgttttttttctggagacccagggaggcccatggtggagatcatttgtaaggaatggatcatggtctgggtttccaaaactaccctagtacagtgaatgagagaaatctgcctggaaattgtttcagaaccatgtacctttatgctttgtgattgtgaaacattgacttttttgtaaccccaaaatgaaaactgtttagtaaaggggatctattttgtgtgttttgaaacttaggtgcaatgtcccctggaaaaagctaaagaaatgtatatgttcaatgacattttaaaataaaatattatatatatgtatatacgacatattcagc

SEQ ID NO: 1715 - DNA, 426 bp, Homo sapiens
  misc_feature 343, 344, 346, 370: n = A,T,C or G
tcagctgtcttaataggatgaagccttaagcagtggaaatttcagttattttccacagtattccattttggaggatttggggtgtttactttttaaattcttgaacaacttaacctccatgaggctttgtgaagtcagctgtgaccaccctcctcttactgtgttctcagtattcattcacttccagggaagaatgacagccacagggagatggtggtgggcaagaatgagagtcccaggatccagatttagcctcagatcttccccattcaggaagggttttccatttaacaagagcactagtatgaaaacattagggacaaatctcccatgtctttgaaanncngattctcctcttgagatccccttnctcacctgccaatcaactttataaggccacaagtgggcactggttttccttccaca

SEQ ID NO: 1716 - DNA, 2188 bp, Homo sapiens
gccgcgtgggggacggcccggttacttcctccagagactgacgagtgcggtgtcgctccagctcagagctcccggagccgcccggccagcgtccggcctccctgatcgtctctggccggcgccctcgccctcgcccggcgcgcaccgagcagccgcgggcgccgagcagccaccgtcccgaccaagcgccggccctgcccgcagcggcaggatgaatgatttcggaatcaagaatatggaccaggtagcccctgtggctaacagttacagagggacactcaagcgccagccagcctttgacacctttgatgggtccctgtttgctgtttttccttctctaaatgaagagcaaacactgcaagaagtgccaacaggcttggattccatttctcatgactccgccaactgtgaattgcctttgttaaccccgtgcagcaaggctgtgatgagtcaagccttaaaagctaccttcagtggcttcaaaaaggaacagcggcgcctgggcattccaaagaacccctggctgtggagtgagcaacaggtatgccagtggcttctctgggccaccaatgagttcagtctggtgaacgtgaatctgcagaggttcggcatgaatggccagatgctgtgtaaccttggcaaggaacgctttctggagctggcacctgactttgtgggtgacattctctgggaacatctggagcaaatgatcaaagaaaaccaagaaaagacagaagatcaatatgaagaaaattcacacctcacctccgttcctcattggattaacagcaatacattaggttttggcacagagcaggcgccctatggaatgcagacacagaattaccccaaaggcggcctcctggacagcatgtgtccggcctccacacccagcgtactcagctctgagcaggagtttcagatgttccccaagtctcggctcagctccgtcagcgtcacctactgctctgtcagtcaggacttcccaggcagcaacttgaatttgctcaccaacaattctgggactcccaaagaccacgactcccctgagaacggtgcggacagcttcgagagctcagactccctcctccagtcctggaacagccagtcgtccttgctggatgtgcaacgggttccttccttcgagagcttcgaagatgactgcagccagtctctctgcctcaataagccaaccatgtctttcaaggattacatccaagagaggagtgacccagtggagcaaggcaaaccagttatacctgcagctgtgctggccggcttcacaggaagtggacctattcagctgtggcagtttctcctggagctgctatcagacaaatcctgccagtcattcatcagctggactggagacggatgggagtttaagctcgccgaccccgatgaggtggcccgccggtggggaaagaggaaaaataagcccaagatgaactacgagaagctgagccggggcttacgctactattacgacaagaacatcatccacaagacgtcggggaagcgctacgtgtaccgcttcgtgtgcgacctccagaacttgctggggttcacgcccgaggaactgcacgccatcctgggcgtccagcccgacacggaggactgaggtcgccgggaccaccctgagccggccccaggctcgtggactgagtgggaagcccatcctgaccagctgctccgaggacccaggaaaggcaggattgaaaatgtccaggaaagtggccaagaagcagtggccttattgcatcccaaaccacgcctcttgaccaggctgcctcccttgtggcagcaacggcacagctaattctactcacagtgcttttaagtgaaaatggtcgagaaagaggcaccaggaagccgtcctggcgcctggcagtccgtgggacgggatggttctggctgtttgagattctcaaaggagcgagcatgtcgtggacacacacagactatttttagattttcttttgccttttgcaaccaggaacagcaaatgcaaaaactctttgagagggtaggagggtgggaaggaaacaaccatgtcatttcagaagttagtttgtatatattattataatcttataattgttctcagaatcccttaacagttgtatttaacagaaattgtatattgtaatttaaaataattatataactgtatttgaaataagaattc

SEQ ID NO: 1717 - DNA, 397 bp, Homo sapiens
  misc_feature 239, 288, 381: n = A,T,C or G
gcgggtgtggaggccggacacatgctgtccaggaggccgcctttggggtaattctgtgtctgcattccatagggcgcctgctctgtgccaaaacctaatgtattgctgttaatccaatgaggaacggaggtgaggtgtgaattttcttcatattgatcttctgtcttttcttggttttctttgatcatttgctccagatgttcccagagaatgtcacccacaaagtcaggtgccagctncagaaagcgttccttgccaaggttacacagcatctggccattcatgccnaacctctgcagattcacgttcaccagactgaactcattggtggcccaaacaagccactggcatacctgttgctcactccacagccaggggttntttggaatgcccaagc

SEQ ID NO: 1718 - DNA, 287 bp, Homo sapiens
  misc_feature 29, 215, 242, 257: n = A,T,C or G
gcgggtgtggaggccggacacatgctgtncaggaggccgcctttggggtaattctgtgtctgcattccatagggcgcctgctctgtgccaaaacctaatgtattgctgttaatccaatgagggacggaggtgaggtgtgaattttcttcatattgatcttctgtcttttcttggttttctttgatcatttgctccagatgttcccatagaatgtnacccacaaagtcaggtgccagcttcanaaagcgttccttgcnaaggttacacagcatctggccattcatgct

SEQ ID NO: 1719 - DNA, 482 bp, Homo sapiens
tcgacccggattccggttccggtgggctccatcagcaagctccagtgctacgtgtccctggcattttaggtgtcggttgggtaggcagtcatggatcaggtaatgcagtttgttgagccaagtcggcagtttgtaaaggactccattcggctggttaaaagatgcactaaacctgatagaaaagaattccagaagattgccatggcaacagcaataggatttgctataatgggattcattggcttctttgtgaaattgatccatattcctattaataacatcattgttggtggctgaatacattttggaagagagtttttcatcttagagattggtgaacaagtgtgagggtgtgagaaactcacagaatacaaatttgcctgtatgttttgtgggtttttttttttcctttcaagatgttttctatttctaaattaaagtaatttcaaaataaaaaaaaaaaaaaaaaaaaaaaaaaaaaa

SEQ ID NO: 1720 - DNA, 395 bp, Homo sapiens
  misc_feature 327, 342, 384: n = A,T,C or G
gcgggggattccggttccggtgggcctccatcagcaagctccagtgctacgtgtccctggcattttaggtgtcggttgggtaggcagtcgtggatcaggtaatgcagtttgttgagccaagtcggcagtttgtaaaggactccattcggctggttaaaagatgcactaaacctgatagaaaagaattccagaagattgccatggcaagagcaataggatttgctataatgggattcattggcttctttgtgaaattgatccatattcctattaataacatcattgttggtggctgaatacattttggaagagagtttttcatcttanagattggtgaacaantgtgagggtgtgagaaactcacagaatacaaatttgcctgtntgttttgtggg

SEQ ID NO: 1721 - DNA, 4497 bp, Homo sapiens
ctgcagccttgaactcctgggttcaactgaaggtcctcctacctcagcctgctgagtagctaggaccacaagcacacaccaccgcaactggcttaaattaaaatataaattgtagagatagggtcttaatgtgttgcccaggctgctcttgaactccttgcttcaggtgatcctcccacctcagcctctcaaagtgctgggattatagacctgagccacagcacctggccaactgacctatgattttacacaatggctgctcttcccttctttaactattattcattcttctttgatcctcattatttgactgtagtccttcttatgtcttgttttccttcattacctcttattctatcacattgccattgtcattctccactggggaagctctttcttgctgaagactggaaagacaagtccattcacctgattttctgtaagattgtggctcatgtattgacttgtcagacaattctgaagtttcatcaaaattagctatcatgcttgcataatggccctgaaccctcactcctacacttagcttcagtaccatctatgtcctcaactgtccatgatacttataattcccgtaaatcttcacttaacacctaacatttatttaatcttactaggcaaggtaataagaaatacataggtttgcctccagaagtgggttcttaagaaacccaccagaggaactcctctttcagatgtccacattagaagatttcatatcacatttggtgccacaggcctttgacaaggaggatgcagaggaaaaagcaaacttcacctcttcctagggaaagtgttggcctgccaacaggaaagaggcaacatctgggaaaatccccagtctttgccaggaagagtccatgccaaccccaccccatgacccctgtcctgcctactcattgtcactcttcactccaatgtccctcccccagatcctctataaaatcccactctttcctgaccagacaaaccataccatatcccaccagagaggtaagtgggagctgagagaagatgagacccagggaggagctactgcacatgacacaggagaatacatgggagggtcccttcctcagggagcacaggaactctgagactcagcaagggtgtcctgggagggctcggggatgggagagtacacagattcacaactcattcagaactgtagaagatgatggatgtgaccaagatcactttagtcctaggggactagagaaggaaaatgacatgaggcagtggggtatctgtgtgttctcccactgaccacgctttctttagtgactcctgattgcctcctcaagtcgcagacactatgctgcctcccatggccctgcccagtgtatcttggatgctgctttcctgcctcatgctgctgtctcaggttcaaggtgagattgctttgcctctagcactgggttccctatgaatcctcagagctaacaagaggaggaaggctcctgtgtgtcatgtgaggtaatgacgtggtgtctaatgaacctgcctgcagttcttgcatcatctctccttccttcaggttaacttgcagtgggaggctccatggtggtccactaacagtggaatgagatggcttccatttagtcagtggactctaatatacactggtgggaaagtggactctaatatacactggagggtcagtaatgagatgtggggagggacaatgattggaggacccaatgtagagacagcccagagtgaggagagtattgaatggttgaataaggggaaagggtaataagagactggatggtgctccatttactatggctattttgagataaagaatttctgaaaacataagggaagatgaaggggtgtcaggaatgtggtcttcctccccaaggacattcctaggtattccccaaggtcatctcccaccccaagccccactcttcattttaccctcccctctcttcttccacctcaggtgaagaaccccagagggaactgccctctgcacggatccgctgtcccaaaggctccaaggcctatggctcccactgctatgccttgtttttgtcaccaaaatcctggacagatgcagatgtgagtggttagatgtggtgttggaggtgaccggtctcagggggaggagggtctccattcaggagagttccttgggaatgaggatgaacacgtttatctttcacacagtcctcctcccacctacctttgccctgccctccctcagcaggtctcaggctccctctcattctctttgttgccctcaaagctggcctgccagaagcggccctctggaaacctggtgtctgtgctcagtggggctgagggatccttcgtgtcctccctggtgaagagcattggtaacagctactcatacgtctggattgggctccatgaccccacacaggtgccagtatatcctccctctctgttacctctcaaggtgctattgttgcccaggcccactccctgtcccctgtgcctgcccaggaagtacttcagggagcactggagctcagattctggggaatatttggggggaaagggaaggccatgaagcatctgaagatctgagttctgtggaggtctctatctttcagataaaatcaatctgccttcctcaggcgtattacataattctcatatgaggctgggttaacaattctctgagcttcatggagtctttgcctactattctgaaggaactcttaatgaagataggatcaatttttgtccccatacagaactgacattacttttgaggttcacaagctaatcacaaatgctacatcaattattgttctgcaaataatatattaccttgagttgttccaaaggtcttatgtttattggctggaattttccaatagcaatgaggagtcaaggaagagtttcctactcaccggcagcatctggaatagcagaccaactttcctcatgctggggagcaaatcaggtgttgcagctaaggggccatgcaagaagagctgcaatggccattcccttcacctggctacctcctctactctacagggcaccgagcccaatggagaaggttgggagtggagtagcagtgatgtgatgaattactttgcatgggagagaaatccctccaccatctcaagccccggccactgtgcgagcctgtcgagaagcacaggtaagaaacagaggagctgcctcttcccagtgttttccatctcatcccccattcctgggtctgaccttcaggaaatcttcctgagctagaaaatacaatgttagtgtgtcttctcttatctcctctcttctccactttctttgaatctctctcctggattgggacactggtgaaggtgagggagaggctttaacttctaggctaaaacctgggatgccccttcattggattcacaagcttcctcagccccattccatttatgtcttctgtctctccagcatttctgaggtggaaagattataactgtaatgtgaggttaccctatgtctgcaagttcactgactagtgcaggagggaagtcagcagcctgtgtttggtgtgcaactcatcatgggcatgagaccagtgtgaggactcaccctggaagagaatattcgcttaattcccccaacctgaccacctcattcttatctttcttctgtttcttcctccccgctgtcatttcagtctcttcattttgtcatacggcctaaggctttaaagagcaataaaatttttagtctgcacttgtttgtcttgtatatgccagtgtcatagccatactctgagaaggacaaagtgtttgagtggaggaaactttatgggtcttgcttcttccctattcacccaggcctctagggaaaatgatgaagtgtgcatccctaccagtgtgttatgatgagggtgtgggtcctgctcatgtaggatttgtgttgtggagagatgaggacatttctctcccgcgtacttactgccctcccattcccgtagcccaaacctgacagtgtgacatgaacagattaggaggctctgatggtgcttagaatagtacttctcagagaatggcatcagcaggatggtagataggactttccagctcttgaaccttcacagaaacattcatttgaactactacccattaaaatggaaataccttcacaagagctaacaatcccaagtgagtgattaaagcatctgaatgttgcaaaaaataagaagggatgcatcgaagagggtagaaagaagacttttacattatttatatcacccctccatcaatctcagtaagcacagcatggagagacattccctaaacttggggaaagagagtgaaataagcacttgagttttccatggaccctaacactaggtttgcctcagtaagacccagtggcctctgactccaggcagacacccttggacttagactccaggctgccttgatgccaggccaggctctgtggccccaggctctgtgaccccaggctccaggtcagcccccatgactgcag

SEQ ID NO: 1722 - DNA, 381 bp, Homo sapiens
gcgggggtgaagagcattggtaacagctactcatacgtctggattgggctccatgaccccacacagggcaccgagcccaatggagaaggttgggagtggagtagcagtgatgtgatgaattactttgcatgggagagaaatccctccaccatctcaagccccggccactgtgcgagcctgtcgagaagcacagcatttctgaggtggaaagattataactgtaatgtgaggttaccctatgtctgcaagttcactgactagtgcaggagggaagtcagcagcctgtgtttggtgtgcaactcatcatgggcatgagaccagtgtgaggactcaccctgggagagaatattcgcttaattcccccaacctgaccacctcatt

SEQ ID NO: 1723 - DNA, 494 bp, Homo sapiens
  misc_feature 264, 294, 400, 443, 450, 451, 467, 477: n = A,T,C or G
cctcaaaaatatttacaatgaagtaaatacactaacagaatttaaaacaggcacaaaatattgaaatgaccaacgttacatgatttcaagggttgtcctttctgtgcttttatctgtcacgacaggaaggtgtggaaagtttatatccttaatttgactactcttggatattaaaatctttctattaattaaaaagacttttagacaacctcttaaatggaattacactatggaaaacagggctcccccaaaaacacctaggcngaactgagagttctttgaaaaccattcccnataaaaactaaatgaaaaataaatataaaacaaagcttaaaaaaatatgcattacctgacaccaaccttttctggctgacaatatttattcatgaaaacatatcanctgtctaccttttatatgcaaaccaagtcctgaggttaactangggctgnngcaaactaacatttangatgcaaacnttcttggatttgtgatg

SEQ ID NO: 1724 - DNA, 498 bp, Homo sapiens
  misc_feature 414, 421, 473: n = A,T,C or G
cgacgtcgactatccaagatgtacaaaaaagaactacttgtattctagaagaaatatgaaatgcttaatttataagcgggctggagattttttccaatattgttttctttgaaaatgaaaggggatcatctattttagttttggggtctgggaactttttgaaaatttaatttgtggaccaatgtttttgtgaaagctaaagagggcaggggttaaaatagggcttgaatttctcattctgtatagaccagcaaacttccctgtgcaaggcaagtttacatcacaaatccaagaatgtttgcatcctaaatgctagtttgcttcagcccctagttaacctcaggacttggtttgcatataaaaggtagacagctgatatgttttcatgaataaatattgtcagccagaaaaggntggtgtnaggtaatgcatatttttttaagctttggtgtatatttatttttcatttaganttattgggaatggttttcaaagaac

SEQ ID NO: 1725 - DNA, 391 bp, Homo sapiens
  misc_feature 119, 147, 164, 212, 266, 362, 363, 382: n = A,T,C or G
ggggagacgggccccaaagccctccggctcaccccaggtgccctaaaccaccactcattttgctactgacatttcctcccgcaagtcccagcacctgcctccactcccacccattgcanatccaggcacagctcacctgtatcccancccctaatctctatgtncaagtgcaccctgatcactgattactgtgttctacatgcattccaaanagttacttcctacttgcccaggactgcagaccacctctgactagaacagaccancaagcgtctttgctatccaatgtgctgaactacaccttctccaataacatctgaactcttattgccttccttatgtacatcttggatagtcgacgnnggtaagggcgaattctgcngatatccat

SEQ ID NO: 1726 - DNA, 442 bp, Homo sapiens
  misc_feature 215: n = A,T,C or G
aaaagaatacaatatgatttgtcaaaaaacatataaaaagacagctgctcttcctcaaatacatgagctaatgataaaagactttttcatgttaatgtctccaagttcttctttttacataaaaaagaacattatggtggcaaatgtgaattatccttttaatattgaacattatattcttttaaaatccatccagatcaaatgcaataattttntttttaactcaacaactgatgctaccaaacgtggactcaatatacttgttaaaacgtgtaaagcgtgtctctagtcttcaaagctttcaggtgaagagaggtgctttttcttgatgcaaatctcaaggcagagaaaatcattttaaagcttataaaaagtggacagagaaatattaaaaacttctctgaaatatacaaatatgtgtaatttttaaaattgaagacag

SEQ ID NO: 1727 - DNA, 2348 bp, Homo sapiens
cacttttgataacctgagtcccggcctggagtacaatgtcagtgtttacactgtcaaggatgacaaggaaagtgtccctatctctgataccatcatcccagctgttcctcctcccactgacctgcgattcaccaacattggtccagacaccatgcgtgtcacctgggctccacccccatccattgatttaaccaacttcctggtgcgttactcacctgtgaaaaatgaggaagatgttgcagagttgtcaatttctccttcagacaatgcagtggtcttaacaaatctcctgcctggtacagaatatgtagtgagtgtctccagtgtctacgaacaacatgagagcacacctcttagaggaagacagaaaacaggtcttgattccccaactggcattgacttttctgatattactgccaactcttttactgtgcactggattgctcctcgagccaccatcactggctacaggatccgccatcatcccgagcacttcagtgggagacctcgagaagatcgggtgccccactctcggaattccatcaccctcaccaacctcactccaggcacagagtatgtggtcagcatcgttgctcttaatggcagagaggaaagtcccttattgattggccaacaatcaacagtttctgatgttccgagggacctggaagttgttgctgcgacccccaccagcctactgatcagctgggatgctcctgctgtcacagtgagatattacaggatcacttacggagaaacaggaggaaatagccctgtccaggagttcactgtgcctgggagcaagtctacagctaccatcagcggccttaaacctggagttgattataccatcactgtgtatgctgtcactggccgtggagacagccccgcaagcagcaagccaatttccattaattaccgaacagaaattgacaaaccatcccagatgcaagtgaccgatgttcaggacaacagcattagtgtcaagtggctgccttcaagttcccctgttactggttacagagtaaccaccactcccaaaaatggaccaggaccaacaaaaactaaaactgcaggtccagatcaaacagaaatgactattgaaggcttgcagcccacagtggagtatgtggttagtgtctatgctcagaatccaagcggagagagtcagcctctggttcagactgcagtaaccactattcctgcaccaactgacctgaagttcactcaggtcacacccacaagcctgagcgcccagtggacaccacccaatgttcagctcactggatatcgagtgcgggtgacccccaaggagaagaccggaccaatgaaagaaatcaaccttgctcctgacagctcatccgtggttgtatcaggacttatggtggccaccaaatatgaagtgagtgtctatgctcttaaggacactttgacaagcagaccagctcagggtgttgtcaccactctggagaatgtcagcccaccaagaagggctcgtgtgacagatgctactgagaccaccatcaccattagctggagaaccaagactgagacgatcactggcttccaagttgatgccgttccagccaatggccagactccaatccagagaaccatcaagccagatgtcagaagctacaccatcacaggtttacaaccaggcactgactacaagatctacctgtacaccttgaatgacaatgctcggagctcccctgtggtcatcgacgcctccactgccattgatgcaccatccaacctgcgtttcctggccaccacacccaattccttgctggtatcatggcagccgccacgtgccaggattaccggctacatcatcaagtatgagaagcctgggtctcctcccagagaagtggtccctcggccccgccctggtgtcacagaggctactattactggcctggaaccgggaaccgaatatacaatttatgtcattgccctgaagaataatcagaagagcgagcccctgattggaaggaaaaagacagttcaaaagacccctttcgtcacccaccctgggtatgacactggaaatggtattcagcttcctggcacttctggtcagcaacccagtgttgggcaacaaatgatctttgaggaacatggttttaggcggaccacaccgcccacaacggccacccccataaggcataggccaagaccatacccgccgaatgtaggacaagaagctctctctcagacaaccatctcatgggccccattccaggacacttctgagtacatcatttcatgtcatcctgttggcactgatgaagaacccttacagttcagggttcctggaacttctaccagtgccactctgacag

SEQ ID NO: 1728 - DNA, 411 bp, Homo sapiens
  misc_feature 238, 251, 318, 340, 358, 366, 372, 383: n = A,T,C or G
tcagaagtgtcctggaatggggcccatgagacggttgtctgagagagagcttcttgtcctgtctttttccttccaatcaggggctcgctcttctgattattcttcagggcaatgacataaattgtatattcggttcccggttccaggccagtaatagtagcctctgtgacaccagggcggggccgagggaccacttctctgggaggagacccaggcttctcatacttgatgatgtagncggtaatcctggnacgtggcggctgccatgataccagcaaggaattgggtgtggtggccaggaaacgcacgttggatggngcatcaatggcagtggaggcgncgatgaccacaggggagntccgagcnttgtcnttcaaggtgtncaggtagatcttgtagtctttgcctgga

SEQ ID NO: 1729 - DNA, 299 bp, Homo sapiens
  misc_feature 182, 269, 289, 291: n = A,T,C or G
cgcctgacagttgtcctgggactgcttgtcttattcctgacctgctatgcagacgacaaaccagacaagccagacgacaagccagacgactcgggcaaagacccaaagccagacttccccaaattcctaagcctcctgggcacagagatcattgagaatgcagtcgagttcatcctccgctncatgtccaggagcacgtaagcactgagaaaaacgttactttttgtccaattctctgttgataatgaccacacaatgacctcatggcnttaaaatacatgagaaacananaaaaaaaa

SEQ ID NO: 1730 - DNA, 430 bp, Homo sapiens
  misc_feature 273, 363, 374, 390, 413: n = A,T,C or G
ttcctggctagtcggtgtaaacgttgcaaaaccagtctgtgggtctaagagctaatgcgggcatggctgttgggatggaggacctgctgtggcttggtcctggtatcgaaagagtctggatttttagggctcatactatcctccgtggtcatgctccaataaattcactgctttgtggcgcgacccttaggtattctgcattttcagctgtggagcccttaaagatgccatttggcttggcttccttgggaaagaagtcctgctggtagtcanggttgtccaggctaatttggtggctgcctttctgggcccagtgggcagggctgtcgaatgtgctgttgacacaggtgggctggacagtgntgagatactcngggttgcccactgcantgctgtgggggtcctggtaatgngggtctctactgggcgc

SEQ ID NO: 1731 - DNA, 5264 bp, Homo sapiens
  misc_feature 2497: n = A,T,C or G
cttccagtttgccaaggcacgagtaacaagctcacgcagttgggcacttttgaagatcattttctcagcctccagaggatgttcaataactgtgaggtggtccttgggaatttggaaattacctatgtgcagaggaattatgatctttccttcttaaagaccatccaggaggtggctggttatgtcctcattgccctcaacacagtggagcgaattcctttggaaaacctgcagatcatcagaggaaatatgtactacgaaaattcctatgccttagcagtcttatctaactatgatgcaaataaaaccggactgaaggagctgcccatgagaaatttacaggaaatcctgcatggcgccgtgcggttcagcaacaaccctgccctgtgcaacgtggagagcatccagtggcgggacatagtcagcagtgactttctcagcaacatgtcgatggacttccagaaccacctgggcagctgccaaaagtgtgatccaagctgtcccaatgggagctgctggggtgcaggagaggagaactgccagaaactgaccaaaatcatctgtgcccagcagtgctccgggcgctgccgtggcaagtcccccagtgactgctgccacaaccagtgtgctgcaggctgcacaggcccccgggagagcgactgcctggtctgccgcaaattccgagacgaagccacgtgcaaggacacctgccccccactcatgctctacaaccccaccacgtaccagatggatgtgaaccccgagggcaaatacagctttggtgccacctgcgtgaagaagtgtccccgtaattatgtggtgacagatcacggctcgtgcgtccgagcctgtggggccgacagctatgagatggaggaagacggcgtccgcaagtgtaagaagtgcgaagggccttgccgcaaagtgtgtaacggaataggtattggtgaatttaaagactcactctccataaatgctacgaatattaaacacttcaaaaactgcacctccatcagtggcgatctccacatcctgccggtggcatttaggggtgactccttcacacatactcctcctctggatccacaggaactggatattctgaaaaccgtaaaggaaatcacagggtttttgctgattcaggcttggcctgaaaacaggacggacctccatgcctttgagaacctagaaatcatacgcggcaggaccaagcaacatggtcagttttctcttgcagtcgtcagcctgaacataacatccttgggattacgctccctcaaggagataagtgatggagatgtgataatttcaggaaacaaaaatttgtgctatgcaaatacaataaactggaaaaaactgtttgggacctccggtcagaaaaccaaaattataagcaacagaggtgaaaacagctgcaaggccacaggccaggtctgccatgccttgtgctcccccgagggctgctggggcccggagcccagggactgcgtctcttgccggaatgtcagccgaggcagggaatgcgtggacaagtgcaaccttctggagggtgagccaagggagtttgtggagaactctgagtgcatacagtgccacccagagtgcctgcctcaggccatgaacatcacctgcacaggacggggaccagacaactgtatccagtgtgcccactacattgacggcccccactgcgtcaagacctgcccggcaggagtcatgggagaaaacaacaccctggtctggaagtacgcagacgccggccatgtgtgccacctgtgccatccaaactgcacctacggatgcactgggccaggtcttgaaggctgtccaacgaatgggcctaagatcccgtccatcgccactgggatggtgggggccctcctcttgctgctggtggtggccctggggatcggcctcttcatgcgaaggcgccacatcgttcggaagcgcacgctgcggaggctgctgcaggagagggagcttgtggagcctcttacacccagtggagaagctcccaaccaagctctcttgaggatcttgaaggaaactgaattcaaaaagatcaaagtgctgggctccggtgcgttcggcacggtgtataagggactctggatcccagaaggtgagaaagttaaaattcccgtcgctatcaaggaattaagagaagcaacatctccgaaagccaacaaggaaatcctcgatgaagcctacgtgatggccagcgtggacaacccccacgtgtgccgcctgctgggcatctgcctcacctccaccgtgcagctcatcacgcagctcatgcccttcggctgcctcctggactatgtccgggaacacaaagacaatattggctcccagtacctgctcaactggtgtgtgcagatcgcaaagggcatgaactacttggaggaccgtcgcttggtgcaccgcgacctggcagccaggaacgtactggtgaaaacaccgcagcatgtcaagatcacagattttgggctggcanactgctgggtgccggagagaagaatacatgcagaagatcccaaggtgcctatcaagtggatggcattggaatcaattttacacagaatctatacccaccagagtgatgtctggagctacggggtgactgtttgggagttgatgacctttggatccaagccatatgacggaatccctgccagcgagatctcctccatcctggagaaaggagaacgcctccctcagccacccatatgtaccatcgatgtctacatgatcatggtcaagtgctggatgatagacgcagatagtcgcccaaagttccgtgagttgatcatcgaattctccaaaatggcccgagacccccagcgctaccttgtcattcagggggatgaaagaatgcatttgccaagtcctacagactccaacttctaccgtgccctgatggatgaagaagacatggacgacgtggtggatgccgacgagtacctcatcccacagcagggcttcttcagcagcccctccacgtcacggactcccctcctgagctctctgagtgcaaccagcaacaattccaccgtggcttgcattgatagaaatgggctgcaaagctgtcccatcaaggaagacagcttcttgcagcgatacagctcagaccccacaggcgccttgactgaggacagcatagacgacaccttcctcccagtgcctgaatacataaaccagtccgttcccaaaaggcccgctggctctgtgcagaatcctgtctatcacaatcagcctctgaaccccgcgcccagcagagacccacactaccaggacccccacagcactgcagtgggcaaccccgagtatctcaacactgtccagcccacctgtgtcaacagcacattcgacagccctgcccactgggcccagaaaggcagccaccaaattagcctggacaaccctgactaccagcaggacttctttcccaaggaagccaagccaaatggcatctttaagggctccacagctgaaaatgcagaatacctaagggtcgcgccacaaagcagtgaatttattggagcatgaccacggaggatagtatgagccctaaaaatccagactctttcgatacccaggaccaagccacagcaggtcctccatcccaacagccatgcccgcattagctcttagacccacagactggttttgcaacgtttacaccgactagccaggaagtacttccacctcgggcacattttgggaagttgcattcctttgtcttcaaactgtgaagcatttacagaaacgcatccagcaagaatattgtccctttgagcagaaatttatctttcaaagaggtatatttgaaaaaaaaaaaaagtatatgtgaggatttttattgattggggatcttggagtttttcattgtcgctattgatttttacttcaatgggctcttccaacaaggaagaagcttgctggtagcacttgctaccctgagttcatccaggcccaactgtgagcaaggagcacaagccacaagtcttccagaggatgcttgattccagtggttctgcttcaaggcttccactgcaaaacactaaagatccaagaaggccttcatggccccagcaggccggatcggtactgtatcaagtcatggcaggtacagtaggataagccactctgtcccttcctgggcaaagaagaaacggaggggatggaattcttccttagacttacttttgtaaaaatgtccccacggtacttactccccactgatggaccagtggtttccagtcatgagcgttagactgacttgtttgtcttccattccattgttttgaaactcagtatgctgcccctgtcttgctgtcatgaaatcagcaagagaggatgacacatcaaataataactcggattccagcccacattggattcatcagcatttggaccaatagcccacagctgagaatgtggaatacctaaggatagcaccgcttttgttctcgcaaaaacgtatctcctaatttgaggctcagatgaaatgcatcaggtcctttggggcatagatcagaagactacaaaaatgaagctgctctgaaatctcctttagccatcaccccaaccccccaaaattagtttgtgttacttatggaagatagttttctccttttacttcacttcaaaagctttttactcaaagagtatatgttccctccaggtcagctgcccccaaaccccctccttacgctttgtcacacaaaaagtgtctctgccttgagtcatctattcaagcacttacagctctggccacaacagggcattttacaggtgcgaatgacagtagcattatgagtagtgtggaattcaggtagtaaatatgaaactagggtttgaaattgataatgctttcacaacatttgcagatgttttagaaggaaaaaagttccttcctaaaataatttctctacaattggaagattggaagattcagctagttaggagcccaccttttttcctaatctgtgtgtgccctgtaacctgactggttaacagcagtcctttgtaaacagtgttttaaactctcctagtcaatatccaccccatccaatttatcaaggaagaaatggttcagaaaatattttcagcctacagttatgttcagtcacacacacatacaaaatgttccttttgcttttaaagtaatttttgactcccagatcagtcagagcccctacagcattgttaagaaagtatttgatttttgtctcaatgaaaataaaactatattcatttcc

SEQ ID NO: 1732 - DNA, 402 bp, Homo sapiens
  misc_feature 250, 317, 344: n = A,T,C or G
aacacggtgactattagtaacaatgtattcttgaaaatctctaagacagtagattttaagtgttctccctactgctctgtgcctcagtttccccatccctaaaatgggggtaataattgcacctacttcacatggttgttgtgaggcttgaataagaatacacgaaaagcacttaagattagtttggggcaaaataaatgttaaccctttagtagtgacaactgtaaccacagtttacattagagcttantgctaccttggacagaggggtcctgacattctcatattcccagccccctgggccactctcagcttgnggtattcccagcagcagtctccatcanagaagatggctagtgatgcctcccttttctagaaaaaacaaaacctggccaggcacgg

SEQ ID NO: 1733 - DNA, 318 bp, Homo sapiens
  misc_feature 217, 291: n = A,T,C or G
tttttttgtgcagtatgacacttacaagatggccagactagaggaagccagaggtgggcatggtaacactactgaaaagttggtggtgtgccatggacaagggaccgactgcagagtatgtttgctgaggaaaatagaggcgaggatagagcaggcaggggaagggaaataagacatggagataggaggttaaagcagttgggagtccatacacagnctacccaacttcctgagaactcttagagaggaaaaggcatccttaggcatccttcctgtgaagattgcctattncgtgatcacgctgagaagatgggaact

SEQ ID NO: 1734 - DNA, 434 bp, Homo sapiens
  misc_feature 341, 413: n = A,T,C or G
aggaatcagaaatcaaatcagccattttcaccattttgtctgttacacacagacgtgtgtgatctatggatggctgtgtctacagtcacaaggtaaaatactccttcagctgggttacaacagagcagtgccggctctggagccaggcggtctggctctgagtcctgcttcacataaaggctatgtgaacctgggcgcgttatttaagccccgtcctccacttcccctgcccatctcattaaggattaatgtgagaaattacacaggtcactacatgtaaagcatctttaacagtgcctggtaactaacaacacttcacctgtgttacgaactactctaantaatgggccaagtcatgagctgcacaaaggcccccaagacccaaacgggtttaatgttaagcaaaatgccgnctggtctcaggtagacactca

SEQ ID NO: 1735 - DNA, 415 bp, Homo sapiens
  misc_feature 173, 265, 295, 314, 324, 413, 414, 415: n = A,T,C or G
cagaggcaattccttttaataggatgacaatcataagaaggaacagttacaattctgaatatgaaagagctgtttctttagtaataaaccaaatacaaagttccgggttcatctgttctggctggcaaatcttgcataaaaaagccatactttagctaaacaaaagcttttangctggcccagaaagagggaatgaacaatttgaaaaacatcttttattgcctgagaaaatttaaaaagtgtctgaaagtgccaggagacctgnctcaatgtgactcaggcagctttccaaagnccctcagctttcctaagtntgagtcatangggaaggagagagggctccttggcaaagatacaggttttcctctctggttccacccccaccattttcatttaaaaaaaaaaaaaaaaannn

SEQ ID NO: 1736 - DNA, 439 bp, Homo sapiens
  misc_feature 168, 205, 211, 309, 393, 422: n = A,T,C or G
caaagtatccaccttgttgtcttataatcacctatttacctatttgccctcctagaaaatgcaagaagatattttctctccttccaaattgaaggaagaacataaaagatataacagggaggagatggtgagatatagagtatgagcggagattaggccagctgtggnaattctggacagatcttgggtttagctaagttatttnttttangcctgggtttctgggggtgacagggaagataaaagagtagtttatttgcacctcttggagaattgcttaaaaatatagagatcatggctctgtatgtnaggtggaaccaggtcaggagtatttgaaactgctcctgggtcattgtgacatatccttcacatctttttgagaaactttataanacaatgggggtgaatgggggctgggcagntggagtctctgagcaga

SEQ ID NO: 1737 - DNA, 361 bp, Homo sapiens
  misc_feature 160, 162, 230, 277, 300, 322, 347: n = A,T,C or G
acagctgaccatcacccgtcacacagaacatcccgtcacacggaacatctcacctgtcacacagaacatccctttacccctcacacggaacatcctgtcacctgctgacacggaacatccgatcacccgtcacacggaacatcccatcacacagaacatncnatcacttgtcacatctcacccatcacacggaacatcccgtcagccatcacatctcacccgtcacacanaacatcccttcacccatcacatggaacatcccatcacccatcacatnttacccgtcacatggaacatccnttcacccatcacatggaacatnccgtcatctgctcacatggaacatnccatcacccatcac

SEQ ID NO: 1738 - DNA, 3132 bp, Homo sapiens
cggatcgcagctctcgcggcagtcgcctgagacttaaggttattgcttggccgcggcctggtattccggcgattcgtttcttgctcggcttcctggagctgtggtccgtgtgggcttccacctcagacagttgcgctggctcagcggggccggaacatggctgcgtccggtctggatcatctcaaaaatggctacagaagaagattttgtcgaccttccagggcacgtgacattaacacagagcaaggccagaatgttctggaaatcttacaagactgttttgaagaaaaaagtcttgccaatgattttagtacaaattctacaaaatcagtgcctaattcaacacgcaaaataaaagacacttgtattcagtcaccaagcaaagagtgccagaaatcacatccaaagtcagttccagtttcttcaaagaagaaagaagcctctctacagtttgttgtagaaccaagtgaagccacaaacagatcagttcaggcccatgaagttcatcagaaaattctggcaactgatgttagttccaaaaatacacctgactcgaaaaaaatatcaagtagaaacataaatgatcatcacagtgaagctgatgaagaattttacttatccgttggctcaccttctgttcttttggatgcaaaaacatctgtatcacaaaatgttattccatctagtgccaaaaagagagagacttacacttttgaaaattcagtaaatatgctgccttcaagtacagaggtttcagttaaaaccaaaaaaaggttaaactttgatgataaagttatgttaaagaaaatagaaatagataataaagtatcagatgaagaggataaaacatcggaaggacaagaaagaaaaccatcaggatcatctcagaatagaatacgagattcagaatatgaaattcaacgacaagctaaaaaaagtttttcaacattgtttttagaaacagtaaaacgaaaaagtgaatccagtcccattgttaggcatgcggcaactgctccacctcattcgtgtcctcccgatgatacgaagttgatagaggatgaatttataattgatgagtcggatcaaagttttgccagtagatcttggattacaataccaagaaaggcagggtctctgaaacaacgcacaatatccccggctgagagcactgcactctttcaaggtagaaagtcaagagaaaagcatcataatatattacctaagactttggcaaatgacaaacattcccataaacctcacccagtagagacatctcagccctctgataaaacagtactggatacaagttatgctttgatagatgaaacagtaaataattatagatctacaaaatatgaaatgtattccaagaatgcagaaaaaccatctagaagcaaaaggactataaaacaaaaacagagaagaaaattcatggctaaaccagctgaagaacagcttgatgtgggacagtctaaagatgaaaacatacatacatcacatattacccaagacgaatttcaaagaaattcagacagaaatatggaagagcatgaagagatgggaaatgattgtgtttccaaaaaacagatgccacctgtgggaagcaagaaaagtagcactagaaaagataaggaagaatctaaaaagaagcgcttttccagtgagtccaagaacaaacttgtacctgaagaagtgacttcaactgtcacgaaaagtcgaagaatttccaggcgtccatctgattggtgggtggtaaaatcagaggagagtcctgtttatagcaattcttcagtaagaaatgaattaccaatgcatcacaatagtagccgaaaatctactaagaaaacaaatcagtcatctaagaatattaggaaaaaaactattccacttaaaaggcagaagacagcaactaaaggcaaccaaagagtacagaagtttttaaatgctgaaggttctggaggtatcgttggtcatgatgaaatttccagatgttcactgagtgagccattggaaagtgatgaggcagacttggctaagaagaaaaatcttgattgttctagatctacaagaagctcaaagaatgaagataacattatgactgcacagaatgttcccctaaagcctcagaccagtggatatacatgtaatataccaacagagtcaaacttggattctggagagcataagacttcagttttagaggaaagtggaccttccaggctcaataataattatttaatgtctggaaagaatgatgtggatgatgaggaagttcatggaagttcagatgactcaaaacaatctaaagtgataccaaagaacagaatccatcacaaactagtattgccctccaacacaccaaatgttcgcaggaccaagagaacacgtttgaaacctttggagtactggcgaggagagcgaatagattatcaaggaaggccatcaggaggattcgtgattagtggagtactatctccagacacaatatcgtctaaaaggaaggcaaaagaaaatattggaaaagtcaacaaaaaatctaataagaaaaggatctgtcttgataacgatgaaagaaagactaacttaatggtaaatctaggtatacctcttggagatcctttgcagccaacgagggtaaaggacccagaaacaagagagattattctcatggatcttgtaaggccacaagatacatatcaattttttgttaagcatggtgagttgaaggtatacaagacattggatacaccctttttttctactgggaaattgatattaggaccacaagaagaaaagggaaagcagcatgttggccaggatatattggttttttatgttaactttggtgaccttttgtgtactttacatgaaacaccttatatattaagtactggggattcgttctatgttccttcaggtaactattataacatcaaaaatctccggaatgaggaaagtgttcttctttttactcagataaaaagatgaaagatcaaccaaccttaaatatatgtatgtatatatgtatatgtaaaaacagtttgtatagttggaatatttgtctttgtaattacttgtgatgttttaaaataaaaattttattcagttttgtgtaaaaaaaaaaaaaaaaaa

SEQ ID NO: 1739 - DNA, 216 bp, Homo sapiens
acaaaaggtcaccaaagttaacataaaaaaccaatatatcctggccaacatgctgctttcccttttcttcttgtggtcctaatatcaatttcccagtagaaaaaaagggtgtatccaatgtcttgtataccttcaactcaccatgcttaacaaaaaattgatatgtatcttgtggccttacaagatccatgagaataatctctcttgtttctgggt

SEQ ID NO: 1740 - DNA, 3302 bp, Homo sapiens
cggcatcctgtgctgtgggggctacgaggaaagatctaattatcatggacctgcgacagtttcttatgtgcctgtccctgtgcacagcctttgccttgagcaaacccacagaaaagaaggaccgtgtacatcatgagcctcagctcagtgacaaggttcacaatgatgctcagagttttgattatgaccatgatgccttcttgggtgctgaagaagcaaagacctttgatcagctgacaccagaagagagcaaggaaaggcttggaaagattgtaagtaaaatagatggcgacaaggacgggtttgtcactgtggatgagctcaaagactggattaaatttgcacaaaagcgctggatttacgaggatgtagagcgacagtggaaggggcatgacctcaatgaggacggcctcgtttcctgggaggagtataaaaatgccacctacggctacgttttagatgatccagatcctgatgatggatttaactataaacagatgatggttagagatgagcggaggtttaaaatggcagacaaggatggagacctcattgccaccaaggaggagttcacagctttcctgcaccctgaggagtatgactacatgaaagatatagtagtacaggaaacaatggaagatatagataagaatgctgatggtttcattgatctagaagagtatattggtgacatgtacagccatgatgggaatactgatgagccagaatgggtaaagacagagcgagagcagtttgttgagtttcgggataagaaccgtgatgggaagatggacaaggaagagaccaaagactggatccttccctcagactatgatcatgcagaggcagaagccaggcacctggtctatgaatcagaccaaaacaaggatggcaagcttaccaaggaggagatcgttgacaagtatgacttatttgttggcagccaggccacagattttggggaggccttagtacggcatgatgagttctgagctgcggaggaaccctcatttcctcaaaagtaatttatttttacagcttctggtttcacatgaaattgtttgcgctactgagactgttactacaaactttttaagacatgaaaaggcgtaatgaaaaccatcccgtccccattcctcctcctctctgagggactggagggaagccgtgcttctgaggaacaactctaattagtacacttgtgtttgtagatttacactttgtattatgtattaacatggcgtgtttatttttgtatttttctctggttgggagtatgatatgaaggatcaagatcctccactcacacatgtagacaaacattagctctttactctttctcaaccccttatatgattttaataattctcacttcactaattttgtaagcctgagatcaataagaaatgttcaggagagaggaaagaaaaaatatatatgctccacaatttatatttagagagagaacacttagtcttgcctgtcaaaaagtccaacatttcataggtagtaggggccacatattacattcagttgctataggtccagcaactgaacctgccattacctgggcaaggaaagatccctttgctctaggaaagcttggcccaaattgattttcttctttttccccctgtaggactgactgttggctaattttgtcaagcacagctgtggtgggaagagttagggccagtgtcttgaaaatcaatcaagtagtgaatgtgatctctttgcagagctatagatagaaacagctggaaaactaaaggaaaaatacaaatgttttcggggcatacattttttttctgggtgtgcatctgttgaaatgctcaagacttaattatttgccttttgaaatcactgtaaatgcccccatccggttcctcttcttcccaggtgtgccaaggaattaatcttggtttcactacaattaaaattcactcctttccaatcatgtcattgaaagtgcctttaacgaaagaaatggtcactgaatgggaattctcttaagaaaccctgagattaaaaaaagactatttggataacttataggaaagcctagaacctcccagtagagtggggatttttttcttcttccctttctcttttggacaatagttaaattagcagtattagttatgagtttggttgcagtgttcttatcttgtgggctgatttccaaaaaccacatgctgctgaatttaccagggatcctcatacctcacaatgcaaaccacttactaccaggcctttttctgtgtccactggagagcttgagctcacactcaaagatcagaggacctacagagagggctctttggtttgaggaccatggcttacctttcctgcctttgacccatcacaccccatttcctcctctttccctctccccgctgccaaaaaaaaaaaaaaggaaacgtttatcatgaatcaacagggtttcagtccttatcaaagagagatgtggaaagagctaaagaaaccaccctttgttcccaactccactttacccatattttatgcaacacaaacactgtccttttgggtccctttcttacagatggacctcttgagaagaattatcgtattccacgtttttagccctcaggttaccaagataaatatatgtatatataacctttattattgctatatctttgtggataatacattcaggtggtgctgggtgatttattataatctgaacctaggtatatcctttggtcttccacagtcatgttgaggtgggctccctggtatggtaaaaagccaggtataatgtaacttcaccccagcctttgtactaagctcttgatagtggatatactcttttaagtttagccccaatatagggtaatggaaatttcctgccctctgggttccccatttttactattaagaagaccagtgataatttaataatgccaccaactctggcttagttaagtgagagtgtgaactgtgtggcaagagagcctcacacctcactaggtgcagagagcccaggccttatgttaaaatcatgcacttgaaaagcaaaccttaatctgcaaagacagcagcaagcattatacggtcatcttgaatgatccctttgaaattttttttttgtttgtttgtttaaatcaagcctgaggctggtgaacagtagctacacacccatattgtgtgttctgtgaatgctagctctcttgaatttggatattggttattttttatagagtgtaaaccaagttttatattctgcaatgcgaacaggtacctatctgtttctaaataaaactgtttacattcaaaaa

SEQ ID NO: 1741 - DNA, 316 bp, Homo sapiens
  misc_feature 13, 22, 237, 298: n = A,T,C or G
caaaggctggggngaagttacnttatacctggctttttaccataccagggagcccacctcaacatgactgtggaagaccaaaggatatacctaggttcagattataataaatcacccagcaccacctgaatgtattatccacaaagatatagcaataataaaggttatatatacatatatttatcttggtaacctgagggctaaaaacgtggaatacgataattcttctcaagaggnccatctgtaagaaagggacccaaaaggacagcgtttgtgttgcataaaatatgggtaaagnggagttgggaacaaaggg

SEQ ID NO: 1742 - DNA, 400 bp, Homo sapiens
  misc_feature 198, 200, 203, 305, 328, 329, 356, 374: n = A,T,C or G
agacaggcaggctcccagtgtgagaagtgcctttaggacaagtagaactgcacacatagatgcaaatgcctgggcctttcttcaggttctgtcatagaacagactgcctgaggccatgctcaggactgcgggcctcagaaacccagcacttgcccctgctctgtctttctgctcccagcagctgaattctagggaaangnctntccgtcaccccaccccgagacagacctgccaagcttctggctttcagattctctgccacatgactgaggtcccatcagcccttttccccaatatgagaatancttgttccagccctccacgtgcnncagggcatggggatcagctggaaaggntgctacacctgtatgctntcctgctccctaaacctgcctcagaa

SEQ ID NO: 1743 - DNA, 842 bp, Homo sapiens
ttcacttctgatgaggaagcctctctccttagccttcagcctttcctcccaccctgccataagtaatttgatcctcaagaagttaaaccacacctcattggtccctggctaattcaccaatttacaaacagcaggaaatagaaacttaagagaaatacacacttctgagaaactgaaacgacaggggaaaggaggtctcactgagcaccgtcccagcatccggacaccacagcggcccttcgctccacgcagaaaaccacacttctcaaaccttcactcaacacttccttccccaaagccagaagatgcacaaggaggaacatgaggtggctgtgctgggggcaccccccagcaccatccttccaaggtccaccgtgatcaacatccacagcgagacctccgtgcccgaccatgtcgtctggtccctgttcaacaccctcttcttgaactggtgctgtctgggcttcatagcattcgcctactccgtgaagtctagggacaggaagatggttggcgacgtgaccggggcccaggcctatgcctccaccgccaagtgcctgaacatctgggccctgattctgggcatcctcatgaccattggattcatcctgtcactggtattcggctctgtgacagtctaccatattatgttacagataatacaggaaaaacggggttactagtagccgcccatagcctgcaacctttgcactccactgtgcaatgctggccctgcacgctggggctgttgcccctgcccccttggtcctgcccctagatacagcagtttatacccacacacctgtctacagtgtcattcaataaagtgcacgtgcttgtga

SEQ ID NO: 1744 - DNA, 316 bp, Homo sapiens
  misc_feature 34, 66, 71, 92, 99, 157, 171, 183, 218, 273, 290: n = A,T,C or G
cacttgtcaaaccttcactcaacacttgcttccnaaagccagaagatgcacaaggaggaacatgangtggntgtgctgggggcaccccccancaccatncttccaaggtccaccgtgatcaacatccacagcgagacctccgtgcccgaccatgtantctggtccctgttnaacaccctcttnttgaactggtgctgtctgggcttcatagcattcgnctactccgtgaagtctagggacaggaagatggatggtgacgtgaccggggcccangcctatgcctccaccgncaagtgcctgaacatctgggccctga

SEQ ID NO: 1745 - DNA, 1898 bp, Homo sapiens
gctcctagtaggtgctggtgaatctggaggtagctacgggatcagggaccagcagtgaaaagtgtacaaactgtatgtgtgtttggattctgccctgtcaactacctgcatgtggcctcaggtaccatcatccaaaaacattgtggctacatgtagatcatgtgcacgtgtttacgaaaccattccccatagccatagccacaggcctcagtcgattgggccagaaggtgcccccactattggcggagaacttagcttcagaattcaccctaaggttcccttagtccccatccccaccacacccccaggtcttgccagagccacctctccccacatgaccccccaagaaagacagccctgtattctaactcaacctgcagcatgccccgcactgccttataagacagttgaggagcggacatcagaaccacctctgaagccctttgttcttttttttctaggtacaggcaccaacctctttgcacagtgagcagcaggactcgctacttctctccacctactcacaacagccagggaccctgggctacccccaaccacccccagcacagccccagcccctacgtcctccccgaagggtcagcagtctgtctgagtcgtcaggcctccagcagccgccccgataatgccccggcactgaagtcgggacacaatcagctttaaccaatggatgaggggggtggccacaggagatggggagaggagtctgaactaaacccctggcttttgtgcacactgcatacgtttcagaactcctggatggtaaccatctctggagtgcagcgcttgctgcagtggaaatgatcaggaatactgaccgtgtttctcttgcctccgaggttcttgggcacactctatagccatactggacaggaaccaggtgccccgtgtaggcatcgtcggtcggtttgccgtcagagatggcgcatctcgctgcatcccccgagagtacaccggttgctctagccacctgcggcccgcccatctgcgctagctggccttcacgctcttgatcgtctttcctttgtattggagaaggactgggtcagagatctgttggagagagagaataaagagattatttttcattatttttaaatggttgtttttgttttaatttgcacagctacacagaggaaataacttaggcactttctgttttttttaaaaaaataataaggtctcatggcttcatttagagaccacagtaacaacagcagcccaccaatcagagaagctggttgttattaaccaagctacagattcacactttctggcctaaaccctaatgggatgaggcttttcaccccaggccatgctggtggtgattttttagcccctaaataaaacactggactatttcctgtttacttcattgattgcaactacaaaggtggactcaaagcaaagcacaatcatgccagccaacattccagaattctgctgagaactccaagtctgtgaggggagaggttttacaagccagacaggcctgggggactgcagtccccaaggagaccctgccacatgctggccctttgagtgagaatgctgcatctttctacatatcttcatgagaatactgagaattggattttccttttcaaaatgcactttgctttttttgtatgttttgttatgttgagatgtttctaaagaaaagattttatgtaattataagatgaagcgtagtgaattgtacagctgttgtaataatgacctatttctatataaaataaaattgtatggcttatgtgtaaattattttgtatctgagataccagttccttttcccaaatataaaagtataaaagttttcttgtgtttttctgtgagtgaaaattttgtaataaattaaccaattgaaaaaaaaaaaaaaa

SEQ ID NO: 1746 - DNA, 275 bp, Homo sapiens
  misc_feature 49, 151, 178, 180, 275: n = A,T,C or G
tggaatgttggctggcatgattgtgctttgctttgagtccacctttgtngttgcaatcaatgaagtaaacaggaaatagtccagtgttttatttaggggctaaaaaatcaccaccaacatggcctgggggtgaaaagcctcatcccattanggtttacgccagaaagtgtgaatctgnancttggttaataacaaccaacttctctgattggtgggctgctgttgttactgtggcctctgaatgaagccatgagaccttattatttttttacctn

SEQ ID NO: 1747 - DNA, 368 bp, Homo sapiens
  misc_feature 223, 323: n = A,T,C or G
tcccaggcggtcccacagaacagcagtgcctcccgaaattcttcactacagacctgctaccgccttcagcatgctaattgtgcatggtggggtggctcagagacctggcacagctctgctcacctttccaacaacatcatacccagcacttcacaaaatatcatagagaaacccttttactttaaagcacacagcatttcactcttgaaaagcactaaatcanttctgtggggacaaacatttacaccatgcctgccattcatgcctgccttacctttatgggtttctctcacatgtttcagaagttccgtccatgtttttgncacaaaggaacatcctttttgacatacatagcctattaaaaaaat

SEQ ID NO: 1748 - DNA, 767 bp, Homo sapiens
aagccacctcaagtggacaaggcacttaccaacagagattgctgatttgctccttaagcaagagattcactgccgctaagcatggctcagaccaactcgttcttcatgctgatctcctccctgatgttcctgtctctgagccaaggccaggagtcccagacagagctgcctaatccccgaatcagctgcccagaaggcaccaatgcctatcgctcctactgctactactttaatgaagaccctgagacctgggttgatgcagatctctattgccagaacatgaattcaggcaacctggtgtctgtgctcacccaggcggagggtgccttcgtggcctcactgattaaggagagtagcactgatgacagcaatgtctggattggcctccatgacccaaaaaagaaccgccgctggcactggagtagtgggtccctggtctcctacaagtcctgggacactggatccccgagcagtgctaatgctggctactgtgcaagcctgacttcatgctcaggattcaagaaatggaaggatgaatcttgtgagaagaagttctcctttgtttgcaagttcaaaaactagaggaagctgaaaaatggatgtctagaactggtcctgcaattactatgaagtcaaaaattaaactagactatgtctccaactcagttcagaccatctcctccctaatgagtttgcatcgctgatcttcagtaccttcacctgtctcagtctctagagccctgaaaaataaaaacaaacttattttt

SEQ ID NO: 1749 - DNA, 595 bp, Homo sapiens
  misc_feature 317, 530, 534, 552, 571, 582, 591: n = A,T,C or G
gcccttaccgacgtcgactatccaagatgtacgcgggggatataaagctcctacagccacctggcctgagaagccaactcagactcagccaacagagattgttgatttgcctcttaagcaagagattcattgcagctcagcatggctcagaccagctcatacttcatgctgatctcctgcctgatgtttctgtctcagagccaaggccaagaggcccagacagagttgccccaggcccggatcagctgcccagaaggcaccaatgcctatcgctcctactgctactactttaatgaagaccgtgagacctgggttgntgcagatctctattgccagaacatgaattcgggcaacctggtgtctgtgctcacccaggccgagggtgcctttgtggcctcactgattaaggagagtggcactgatgacttcaatgtctggattggcctccatgaccccaaaaagaaccgccgctggcactggagcagtgggtccctggtctcctacaagtcctggggcattggagccccaancagngttaatcctggctactgngtgagcctgacctcaagcncaggattccanaaatggaangatg

SEQ ID NO: 1750 - DNA, 546 bp, Homo sapiens
  misc_feature 204, 221, 237, 254, 259, 287, 370, 406, 411, 415, 507, 521: n = A,T,C or G
gcccttaccgacgtcgactatccaagatgtactgaagatcagcgatgcaaactcattagggaggagatggtctgaactgagttggagacatagtctagtttaatttttgacttcatagtaattgcaggaccagttctagacatccatttttcagcttcctctagtttttgaacttgcaaacaaaggagaacttcttctcacaanattcatccttccatttnttgaatcctgagcatnaagtcaggcgttgcccntatanccagcattagcactgctcggggatccantgtcccaggacttgtaggagaccagggaccgactactccagtgccagcggcggttcttttttgggtcatggaggccaatccanacattgctgccatcagtgctacgctccttaatcagngaggncacnaacgcaccctccgcctgggtgagcacagacaccaggttgcctgaattcatgttctggcaatagagatctagcatcaacccaggtctcagggncttcattaaagtantagcagtaggagcgataggcattgg

SEQ ID NO: 1751 - DNA, 465 bp, Homo sapiens
  misc_feature 22, 369, 406, 415, 433, 450, 460, 464: n = A,T,C or G
gcccttaccgacgtcgactatncaagatgtactggagatcagcgatgcaaactcattagggaggagatggtcttgaactgagttggagacatagtctagtttaatttttgacttcatagtaattgcaggaccagttctagacatccatttttcagcttcctctagtttttgaacttgcaaacaaaggagaacttcttctcacaagattcatccttccatttcttgaatcctgagcatggagtcaggcttgcacagtagccagcattagcactgctcggggatccagtgtcccaggacttgtaggagaccagggacccactactccagtgccagcggcggttcttttttgggtcatggaggccaatccanacattgctgtcatcagtgctacttgtccttaatcagngaggccacnaagcaccctcccctgggngaggacagacaccaggngtgcctgaanttant

SEQ ID NO: 1752 - DNA, 434 bp, Homo sapiens
  misc_feature 22, 344, 376, 400, 407, 415, 426: n = A,T,C or G
gcccttaccgacgtcgactatncaagatgtacgcgggggaagccaactcagactcagccaacagagattgttgatttgcctcttaagcaagagattcattgcagctcagcatggctcagaccagctcatacttcatgctgatctcctgcctgatgtttctgtctcagagccaaggccaagaggcccagacagagttgccccaggcccggatcagctgcccagaaggcaccaatgcctatcgctcctactgctactactttaatgaagaccgtgagacctgggttgatgcagatctctattgccagaacatgaattcgggcaacctggtgtctgtgctcacccangccgagggtgcctttgtggcctcctgattaangaggagtggcacttgatgacttcnatgtctnggattggnctccatgaccncaaaaaga

SEQ ID NO: 1753 - DNA, 517 bp, Homo sapiens
  misc_feature 478: n = A,T,C or G
gcccttaccgacgtcgactatccaagatgtactgaagatcagcgatgcaaactcattagggaggagatggtctgaactgagttggagacatagtctagtttaatttttgacttcatagtaattgcaggaccagttctagacatccatttttcagcttcctctagtttttgaacttgcaaacaaaggagaacttcttctcacaagattcatccttccatttcttgaatcctgagcatgaagtcaggcttgcacagtagccagcattagcactgctcggggatccagtgtcccaggacttgtaggagaccagggacccactactccagtgccagcggcggttcttttttgggtcatggaggccaatccacacattgctgtcatcagtgctactctccttaatcagtgaggccacgaaggcaccctccgcctgggtgagcacagacaccaggttgcctgaattcatgttctggcaataganatctgcatcaacccaggtctcagggtcttcattaaagta

SEQ ID NO: 1754 - DNA, 479 bp, Homo sapiens
  misc_feature 24, 454: n = A,T,C or G
gcccttaccgacgtcgactatccnagatgtacgcgggggaagaagccaactcagactcagccaacagagattgttgatttgcctcttaagcaagagattcattgcagctcagcatggctcagaccagctcatacttcatgctgatctcctgcctgatgtttctgtctcagagccaaggccaagaggcccagacagagttgccccaggcccggatcagctgcccagaaggcaccaatgcctatcgctcctactgctactactttaatgaagaccgtgagacctgggttgatgcagatctctattgccagaacatgaattcgggcaacctggtgtctgtgctcacccaggccgagggtgcctttgtggcctcactgatgaaggagagtggcactgatgacttcaatgtctggattggcctccatgaccccaaaaagaaccgccgctggcactggancagtgggtccctggtctcctacaag

SEQ ID NO: 1755 - DNA, 498 bp, Homo sapiens
  misc_feature 22, 353, 413, 469, 473: n = A,T,C or G
gcccttaccgacgtcgactatncaagatgtacgcgggggaagccaactcagactcagccaacagagattgttgatttgcctcttaagcaagagattcattgcagctcagcatggctcagaccagctcatacttcatgctgatctcctgcctgatgtttctgtctcagagccaaggccaagaggcccagacagagttgtcccaggcccggatcagctgcccagaaggcaccaatgcctatcgctcctactgctactactttaatgaagaccgtgagacctgggttgatgcagatctctattgccagaacatgaattcgggcaacctggtgtctgtgctcacccaggccgagggngcctttgtggcctcactgattaaggagagtggcactgatgacttcaatgtctggattggnctccatgaccccaaaaagaaccgccgctggcactggagcagtgggtccctggtctnctanaagtactggggcattggagccccaa

SEQ ID NO: 1756 - DNA, 593 bp, Homo sapiens
  misc_feature 377, 467, 469, 576: n = A,T,C or G
gcccttaccgacgtcgactatccaagatgtacggggacaaggcacttaccaacagagattgctgatttgctccttaagcaagagattcactgccgctaagcatggctcagaccaactcgttcttcatgctgatctcctccctgatgttcctgtctctgagccaaggccaggagtcccagacagagctgcctaatccccgaatcagctgcccagaaggcaccaatgcctatcgctcctactgctactactttaatgaagaccctgagacctgggttgatgcagatctctattgccagaacatgaattcaggcaacctggtgtctgtgctcacccatgcggagggtgccttcgtggcctcactgattaaggagagtagnactgatgacagcaatgtctggattggcctccatgacccaaaaaagaaccgccgctggcactggagtagtgggtccctggtctcctacaantnctgggacactggatccccgagcagtgctaatgctggctactgtgcaagcctgacttcatgctcaggattcaagaaatggaaggatgaatcttgtgagaagaattctnctttgtttgcaagttcc

SEQ ID NO: 1757 - DNA, 123 bp, Homo sapiens
  misc_feature 23, 34, 45, 54, 75, 100: n = A,T,C or G
catcgtctggaactgatttgganacattgtctantttaatttttnacttcatantaattgcaggaccagttctanacatccatttttcaacttcctctantttttgaacttgcaaacaaagga

SEQ ID NO: 1758 - DNA, 331 bp, Homo sapiens
  misc_feature 285, 305: n = A,T,C or G
gcccttaccgacgtcgactatccaagatgtactgaagatcagcgatgcaaactcattagggaggagatggtctgaactgagttggagacatagtctagtttaatttttgacttcatagtaattgcaggaccagttctagacatccatttttcagcttcctctagtttttgaacttgcaaacaaaggagaacttcttctcacaagattcatccttccatttcttgaatcctgagcatgaagtcaggcttgcacagtagccagcattagcactgctcggggatccantgtcccaggacttgtagganaccagggacccactactccagtgcca

SEQ ID NO: 1759 - DNA, 642 bp, Homo sapiens
  misc_feature 476, 534, 536, 569, 613, 630: n = A,T,C or G
gcccttaccgacgtcgactatccaagatgtacgcgggggatataaagctcctacagctacctggcctgagaagccaactcagactcagccaacagagattgttgatttgcctcttaagcaagagattcattgcagctcagcatggctcagaccagctcatacttcatgctgatctcctgcctgatgtttctgtctcagagccaaggccaagaggcccagacagagttgccccaggcccggatcagctgcccagaaggcaccaatgcctatcgctcctactgctactactttaatggagaccgtgagacctgggttgatgcagatctctattgccagaacatgaattcgggcaacctggtgtctgtgctcacccaggccgagggtgcctttgtggcctcactgattaaggagagtggcactgatgacttcaatgtctggattggcctccatgaccccaaaaagaaccgccgctggcnctggagcagtgggtccctggtctcctacaagtcctggggcattggagccccaagcagngntaatcctggctactgtgtgagcctgacatcaancacagggattccagaaatggaaagatgtgccttgtgaagacaanaactcctttgtctgcangttcaaaaacta

SEQ ID NO: 1760 - DNA, 471 bp, Homo sapiens
  misc_feature 339, 438, 439: n = A,T,C or G
gcccttaccgacgtcgactatccaagatgtactgaagatcagcgatgcaaactcattagggaggagatggtctgaactgagttggagacatagtctagtttaatttttgacttcatagtaattgcaggaccagttctagacatccatttttcagcttcctctagtttttgaacttgcaaacaaaggagaacttcttctcacaagattcatccttccatttcttgaatcctgagcatgaagtcaggcttgcacagtagccagcattagcactgctcggggatccagtgtcccaggacttgtaggagaccagggacccactactccagtgccagcgggggntcttttttgggtcatggaggccaatccaaacattgctgtcatcagtgctactctccttaatcaagggagggcacgaaggcaccctccgcctgggtgagnncagacaccaagttgcctgaattcatgttctgg

SEQ ID NO: 1761 - DNA, 461 bp, Homo sapiens
  misc_feature 25, 190, 415, 422, 444: n = A,T,C or G
gcccttaccgacgtcgactatccangatgtacgcgggggagaagccaactcagactcagccaacagagattgttgatttgcctcttaagcaagagattcattgcagctcagcatggctcagaccagctcatacttcatgctgatctcctgcctgatgtttctgtctcagagccaaggccaagaggcccanacagagttgccccaggcccggatcagctgcccagaaggcaccaatgcctatcgctcctactgctactactttaatgaagaccgtgagacctgggttgatgcagatctctattgccagaacatgaattcgggcaacctggtgtctgtgctcacccacgccgagggtgcctttgtggcctcactgattaaggagagaggcactgatgacttcaatgtctggattggnctccatnaccccaaaaagaaccgccgctngcactggagcagtgggt

SEQ ID NO: 1762 - DNA, 386 bp, Homo sapiens
  misc_feature 336, 372: n = A,T,C or G
gcccttaccgacgtcgactatccaagatgtactgaagatcagcgatgcaaactcattagggaggagatggtctgaactgagttggagacatagtctagtttaatttttgacttcatagtaattgcaggaccagttctagacatccatttttcagcttcctctagtttttgaacttgcaaacaaaggagaacttcttctcacaggattcatccttccatttcttgaatccttttttgggtcatggaggccaatccagacattgctgtcatcagtgctactctccttaatcagtgaggccacgaaggcaccctccgcctgggtgagcacagacaccangttgcctgaattcatgttctggcaatagagatctgnatcaacccaggtct

SEQ ID NO: 1763 - DNA, 333 bp, Homo sapiens
  misc_feature 22, 267: n = A,T,C or G
gcccttaccgacgtcgactatncaagatgtactgaagatcagcgatgcaaactcattagggaggagatggtctgaactgagttggagacatagtctagtttaatttttgacttcatagtaattgcaggaccagttctagacatccatttttcagcttcctctagtttttgaacttgcaaacaaaggagaacttcttctcacaagattcatccttccatttcttgaatcctgagcatgaagtcaggcttgcacagtagccagcattancactgctcggggatccagtgtcccaagacttgtaggagaccagggacccactactccagtgccagg

SEQ ID NO: 1764 - DNA, 492 bp, Homo sapiens
  misc_feature 404, 409, 475, 477: n = A,T,C or G
gcccttaccgacgtcgactatccaagatgtactgaagatcagcgatgcaaactcattagggaggagatggtctgaactgagttggagacatagtctagtttaatttttgacttcatagtaattgcaggaccagttctagacatccatttttcagcttcctctagtttttgaacttgcaaacaaaggagaacttcttctcacaagattcatccttccatttcttgaatcctgagcatgaagtcaggcttgcacagtagccagcattagcactgctcggggatccagtgtcccaggacttgtaggagaccagggacccactactccagtgccagcggcggttcttttttgggtcatggaggccaatccagacattgctgtcatcagtgctactctccttaatcagngaggncacgaaggcaccctccgctgggtgagcacagacaccaggttgcctgaattcatgttctggcaatananatctgcatcaaccca

SEQ ID NO: 1765 - DNA, 406 bp, Homo sapiens
  misc_feature 205, 381, 388: n = A,T,C or G
gcccttaccgacgtcgactatccaagatgtacggggacaaggcacttaccaacagagattgctgatttgctccttaagcaagagattcactgccgctaagcatggctcagaccaactcgttcttcatgctgatctcctccctgatgttcctgtctctgagccaaggccaggagtcccagacagagctgcctaatccccgaatcanctgcccagaaggcaccaatgcctatcgctcctactgctactactttaatgaagaccctgagacctgggttgatgcagatctctattgccagaacatgaattcaggcaacctggtgtctgtgctcacccatgcggagggtgccttcgtggcctcactgattaaggagagtagcactnatgacancaatgtctggattggcct

SEQ ID NO: 1766 - DNA, 494 bp, Homo sapiens
  misc_feature 368, 427, 448: n = A,T,C or G
gcccttaccgacgtcgactatccaagatgtactgaagatcagcgatgcaaactcattagggaggagatggtctgaactgagttggagacatagtctagtttaatttttgacttcatagtaattgcaggaccagttctagacatccatttttcagcttcctctagtttttgaacttgcaaacaaaggagaacttcttctcacaagattcatccttccatttcttgaatcctgagcatgaagtcaggcttgcacagtagccagcattagcactgctcggggatccagtgtcccaggacttgtaggagaccagggacccactactccagtgccagcggcggttcttttttgggtcatggaggccaatccanacattgctgtcatcagtgctactctccttaatcagtgaggccacgaaggcaccctccgnctgggtgagcacagacaccanggtgcctgaattcatgttctggcaatagagatctgcatcacccacg

SEQ ID NO: 1767 - DNA, 569 bp, Homo sapiens
  misc_feature 22, 409, 494, 515, 518, 527, 558, 559: n = A,T,C or G
gcccttaccgacgtcgactatncaagatgtactgaagatcagcgatgcaaactcattagggaggagatggtctgaactgagttggagacatagtctagtttaatttttgacttcatagtaattgcaggaccagttctagacatccatttttcagcttcctctagtttttggacttgcaaacaaaggagaacttcttctcacaagattcatccttccatttcttgaatcctgagcatgaagtcaggcttgcacagtagccagcattagcactgctcggggatccagtgtcccaggacttgtaggagaccagggacccactactccagtgccagcggcggttcttttttgggtcatggaggccaatccagacattgctgtcatcagtgctactctccttaatcagtgaggncacgaaggcaccctccgcctgggtgagcacagacaccaggttgcctgaattcatgttctggcaatagagatctgcatcaacccangtctcagggtcttcattaaantantagcagtangagcgataggcattggtgccttctgggcagnntgattccggg

SEQ ID NO: 1768 - DNA, 411 bp, Homo sapiens
  misc_feature 347: n = A,T,C or G
gcccttaccgacgtcgactatccaagatgtaccgggggatataaagctcccacagccacctggcctgagaagccaactcagactcagccaacagagattgttgatttgcctcttaagcaagagattcattgcagctcagcatggctcagaccagctcatacttcatgctgatctcctgcctgatgtttctgtctcagagccaaggccaagaggcccagacagagttgccccaggcccggatcagctgcccagaaggcaccaatgcctatcgctcctactgctactactttaatgaagaccgtgagacctgggttgatgcagatctctattgccagaacatgaattcnggcaacctggtgtctgtgctcacccacgccgagggtgcctttgtggctcactgattaaggagag

SEQ ID NO: 1769 - DNA, 198 bp, Homo sapiens
  misc_feature 26, 93, 106, 175: n = A,T,C or G
gcccttaccgacgtcgactatccaanatgtacggggacaaggcacttaccaacagagattgctgatttgctccttaagcaagagattcactgncgctaagcatggntcagaccaactcgttcttcatgctgatctcccccctgatgttcctgtctctgagccaaggccaggagtnccagacagagctgcctaatcccc

SEQ ID NO: 1770 - DNA, 406 bp, Homo sapiens
  misc_feature 241, 313, 342, 360, 379, 390: n = A,T,C or G
atgtcctgaagatcagcgatgcaaactcattagggaggagatggtctgaactgagttggagacatagtctagtttaatttttgacttcatagtaattgcaggaccagttctagacatccatttttcagcttcctctagtttttgaacttgcaaacaaaggagaacttcttctcacaagattcatccttccatttcttgaatcctgagcatgaagtcaggcttgcacagtagccagcattancactgctcggggatccagtgtcccaggacttgtaggagaccagggacccactactccagtgccagcggcggntcttttttgggtcatggaggccaatccanacattgctgtcatcagangctactctccttaatcagngaggccacganggcaccctccgcctgg

SEQ ID NO: 1771 - DNA, 561 bp, Homo sapiens
  misc_feature 348, 353, 397, 469, 471, 504, 536: n = A,T,C or G
gcccttaccgacgtcgactatccaagatgtacgcggggacaaggcacttaccaacagagattgctgatttgctccttaagcaagagattcactgccgctaagtatggctcagaccaactcgttcttcatgctgatctcctccctgatgttcctgtctctgagccaaggccaggagtcccagacagagctgcctaatccccgaatcagctgcccagaaggcaccaatgcctatcgctcctactgctactactttaatgaagaccctgagacctgggttgatgcagatctctattgccagaacatgaattcaggcaacctggtgtctgtgctcacccaggcggagggtgncttcntggcctcactgattaaggagagtagcgctgatgacagcaatgtntggattggcctccatgacccaaaaaagaaccgccgctggcactggagtagtgggtccctggtctcctacaantnctgggacactggatccccgagcagtgctaatgntggctactgtgcaagcctgacttcatgctcangattcaagaaatggaaaggatgaat

SEQ ID NO: 1772 - DNA, 391 bp, Homo sapiens
  misc_feature 204, 282, 333, 378: n = A,T,C or G
gcccttaccgacgtcgactatccaagatgtactgaagatcagcgatgcaaactcattagggaggagatggtctgaactgagttggagacatagtctagtttaatttttgacttcatagtaattgcaggaccagttctagacatccatttttcagcttcctctagtttttgaacttgcaaacaagggagaacttcttctcacaanattcatccttccatttcttgaatcctgagcatgaagtcaggcttgcacagtagccagcattagcactgctcggggatncagtgtcccaggacttgtaggagaccagggacccactactccagtgccagnggcggttcttttttgggtcatggaggccaatccacacattgctgncatcagtgctact

SEQ ID NO: 1773 - DNA, 563 bp, Homo sapiens
  misc_feature 396, 405, 468, 469, 499, 535, 552: n = A,T,C or G
gcccttaccgacgtcgactatccaagatgtacgcgggacaaggcacttaccaacagagattgctgacttgctccttaagcaagagattcactgccgctaagcatggctcagaccaactcgttcttcatgctgatctcctccctgatgttcctgtctctgagccaaggccaggagtcccagacagagctgcctaatccccgaatcagctgcccagaaggcaccaatgcctatcgctcctactgctactactttaatgaagaccctgagacctgggttgatgcagatctctattgccagaacatgaattcaggcaacctggtgtctgtgctcacccaggcggagggtgccttcgtggcctcactgattaaggagagtagcactgatgacagcaatgtntggattggnctccatgacccaaaaaagaaccgccgctggcactggagtagtgggtccctggtctcctacaannactgggacactggatccccgagcagtgctnatgctggctactgtgcaagcctgacttcatgctcangattcaagaaatggaangatgaatcttg

SEQ ID NO: 1774 - DNA, 507 bp, Homo sapiens
  misc_feature 379, 448, 453, 494, 496: n = A,T,C or G
gcccttaccgacgtcgactatccaagatgtactgaagatcagcgatgcaaactcattagggaggagatggtctgaactgagttggagacatagtctagtttaatttttgacttcatagtaattgcaggaccagttctagacgtccatttttcagcttcctctagtttttgaacttgcaaacaaaggagaacttcttctcacaagattcatccttccatttcttgaatcctgagcatgaagtcaggcttgcacagtagccagcattagcactgctcggggatccagtgtcccaggacttgtaggagaccagggacccactactccagtgccagcggcggttcttttttgggtcatggaggccaatccaaacattgctgtnatcagtgctactctccttaatcagtgagaccacgaaggcaccctccgcctgggtgagcacagacaccangttgnctgaattcatgttctggcaatagagatctgcatcaacccangnctcagggtctt

SEQ ID NO: 1775 - DNA, 414 bp, Homo sapiens
  misc_feature 2, 367: n = A,T,C or G
tnaggtgacactatagaatactcaagctatgcatcaagcttggtaccgagctcggatccactagtaacggccgccagtgtgctggaattcgcccttaccgacgtcgactatccaagatgttgctgtcatcagtgctactctccttaatcagtgaggccacgaaggcaccctccgcctgggtgagcacagacaccaggttgcctgaattcatgttctggcaatagagatctgcatcaaccaggtctcagggtcttcattaaagtagtagcagtaggagcgataggcattggtgccttctgggcagctgattcggggattaggcagctctgtctgggactcctggccttggctcagagacaggaacatnagggaggagatcagcatgaagaacgagttggtctgagccatgcttag

SEQ ID NO: 1776 - DNA, 556 bp, Homo sapiens
  misc_feature 409, 413, 476, 478, 504, 525, 527: n = A,T,C or G
gcccttaccgacgtcgactatccaagatgtactgaagatcagcgatgcaaactcattagggaggagatggtctgaactgagttggagacatagtctagtttaatttttgacttcatagtaattgcaggaccagttctagacatccatttttcagcttcctctagtttttgaacttgcaaacaaaggagaacttcttctcacaagattcatccttccatttcttgaatcctgagcatgaagtcaggcttgcacagtagccagcattagcactgctcggggatccagtgtcccaggacttgtaggagaccagggacccactactccagtgccagcggcggttcttttttgggtcatggaggccaatccacacattgctgtcatcagtgctactctccttaatcagtgaggncacnaaggcaccctccgcctgggtgagcacagacaccaggttgcctgaattcatgttctggcaatananatctgcatcaacccaggtctcagggncttcattaaagtagtagcagnangagcgataggcattggtgccttctgggca

SEQ ID NO: 1777 - DNA, 594 bp, Homo sapiens
  misc_feature 22, 35, 172, 181, 201, 205, 390, 396, 411, 470, 527, 537,544, 567, 577, 578: n = A,T,C or G
gcccttaccgacgtcgactatngaagatgtacgcngggacaaggcacttaccaacagagattgctgatttgctccttaagcaagagattcactgccgctaagcatggctcagaccaactcgttcttcatgctgatctcctccctgatgttcctgtctctgagccaaggccangagtcccanacagagctgcctaatccccnaatnagctgcccagaaggcaccaatgcctatcgctcctactgctactactttaatgaagaccctgagacctgggttgatgcagatctctattgccagaacatgaattcaggcaacctggtgtctgtgctcacccaggcggagggtgccttcgtggcctcactgattaaggagagtagcactgatgacancaatgnctggattggcctccntgacccaaaaaagaaccgccgctggcactggagtagtgggtccctggtctcctacaagncctgggacactggatccccgagcagttgctaatgctggctactgtgcaagcctgacntcatgctcangattcangaaatggaaaggatgaatcttgngagaagaagnnctccttttgttgcaag

SEQ ID NO: 1778 - DNA, 585 bp, Homo sapiens
  misc_feature 22, 335, 467, 469, 498, 546, 572, 577, 585: n = A,T,C or G
gcccttaccgacgtcgactatncaagatgtacggggacaaggcacttaccaacagagattgctgatttgctccttaagcaagagattcactgccgctaagcatggctcagaccaactcgttcttcatgctgatctcctccctgatgttcctgtctctgagccaaggccaggagtcccagacagagctgcctaatccccgaatcagctgcccagaaggcaccaatgcctatcgctcctactgctactactttaatgaagaccctgagacctgggttgatgcagatctctattgccagaacatgaattcaggcaacctggtgtctgtgctcacccangcggagggtgccttcgtggcctcactgattaaggagagtagcactgatgacagcaatgtctggattggcctccatgacccaaaaaagaaccgccgctggcactggagtagtgggtccctggtctcctacaantnctgggacactggatccccgagcagtgctnatgctggctactgtgcaagcctgacttcatgctcaggattcaagaaanggaaggatgaatcttgtgagaagaanttctnctttgttn

SEQ ID NO: 1779 - DNA, 72 bp, Homo sapiens
  misc_feature 44: n = A,T,C or G
gcccttaccgacgtcgactatccaagatgtacggggattaggcngctctgtctgggactcctaaacatggct

SEQ ID NO: 1780 - DNA, 477 bp, Homo sapiens
  misc_feature 368, 379, 382, 409, 416, 450: n = A,T,C or G
gcccttaccgacgtcgactatccaagatgtactgaagatcagcgatgcaaactcattagggaggagatggtctgaactgagttggagacatagtctagtttaatttttgacttcatagtaattgcaggaccagttctagacatccatttttcagcttcctctagtttttgaacttgcaaacaaaggagaacttcttctcacaagattcatccttccatttcttgaatcctgagcatgaagtcaggcttgcacagtagccagcattagcactgctcggggatccagtgtcccaggacttgtaggagaccagggacccactactccagtgccagcggcggttcttttttgggtcatggaggccaatccanacattgctgtnatnagtgctactctccttaatcagtgaggncacgaangcaccctccgcctgggtgagcacagacaccaagntgcctgaattcatgttctggcaataga

SEQ ID NO: 1781 - DNA, 561 bp, Homo sapiens
  misc_feature 353, 406, 447, 469, 470, 502, 517, 518, 534, 540, 559: n = A,T,C or G
gcccttaccgacgtcgactatccaagatgtacgcggggacaaggcacttaccaacagagattgctgatttgctccttaagcaagagattcactgccgctaagcatggctcagaccaactcgttcttcatgctgatctcctccctgatgttcctgtctctgagccaaggccaggagtcccagacagagctgcctaatccccgaatcagctgcccagaaggcatcaatgcctatcgctcctactgctactactttaatgaagaccctgagacctgggttgatgcagatctctattgccagaacatgaattcaggcaacttggtgtctgtgctcacccaggcggagggtgccttcntggcctcactgattaaggagagtagcactgatgacagcaatgtctggattggnctccatgacccaaaaaagaaccgccgctggcactggagtantgggtccctggtctctacaaannctgggacactggatcccgagcagtgctaatgntggctactgtgcaannctgacttattgctcangattcnagaaatggaaggatgaatntt

SEQ ID NO: 1782 - DNA, 162 bp, Homo sapiens
  misc_feature 8, 15, 136: n = A,T,C or G
gcccttancgacgtngactatccaagatgtacggggacaaggcacttaccaacagagattgctgatttgctccttaagcaagagattcactgccgctaagcatggctcagaccaactcgttcttcatgctgatctnctccctgatgttcctgtctctgagcc

SEQ ID NO: 1783 - DNA, 143 bp, Homo sapiens
  misc_feature 15, 27, 43, 65, 80, 97, 104, 111, 132: n = A,T,C or G
gcccttaccgacgtngactatccaagngtactgaagatcagcnatgcaaactcattagggagganatggtctgaactganctggagacatagcctanattaatntttgacntcataggaattgcaggaccanttctagacatg

SEQ ID NO: 1784 - DNA, 472 bp, Homo sapiens
  misc_feature 15, 234, 245, 346, 348, 375, 384, 414, 424, 435: n = A,T,C or G
gcccttaccgacgtngactatccaagatgtacgcgggggatataaagctcctacagctacctggcctgagaagccaactcagactcagccaacagagattgttgatttgcctcttaagcaagagattcattgcagctcagcatggctcagaccagctcatacttcatgctgatctcctgcctgatgtttctgtctcagagccaaggccaagaggcccagacagagttgccccangcccggatcanctgcccagaaggcaccaatgcctatcgctcctactgctactactttaatgaataccgtgagacctgggttgatgcagatctctattgccagaacatgaatncnggcaacctggtgtctgtgctcacccangccgagggngcctttgtggcctcactgattaaggagagnggcactgatnacttcaatgtntggattggcctccatgaccccaaaaagaaccgccctg

SEQ ID NO: 1785 - DNA, 509 bp, Homo sapiens
  misc_feature 240, 302, 368, 410, 442, 476: n = A,T,C or G
gcccttaccgacgtcgactatccaagatgtactgaagatcagcggtgcaaactcattagggaggagatggtctgaactgagttggagacatagtctagtttaatttttgacttcatagtaattgcaggaccagttctagacatccatttttcagcttcctctagtttttgaacttgcatacaaaggagaacttcttctcacaagattcatccttccatttcttgaatcctgagcatgaantcaggcttgcacagtagccagcattagcactgctcggggatccagtgtcccaggacttgtangagaccagggacccactactccagtgccagcggcggttcttttttgggtcatggaggccaatccanacattgctgtcatcagtgctactctccttaatcaagtgaggncacgaaggcaccctccgcctgggtgagcacanacaccaggttgcctgaattcatgttctggcaatngaagatttgcatcaacccaggcctcagggtctt

SEQ ID NO: 1786 - DNA, 493 bp, Homo sapiens
  misc_feature 454: n = A,T,C or G
gcccttaccgacgtcgactatccaagatgtacggggacaaggcacttaccaacagagattgctgatttgctccttaagcaagagattcactgccgctaagcatggctcagaccaactcgttcttcatgctgatctcctccctgatgttcctgtctctgagccaaggccaggagtcccagacagagctgcctaatccccgaatcagctgcccagaaggcaccaatgcctatcactcctactgctactactttaatgaagaccctgagacctgggttgatgcagatctctattgccagaacatgaattcaggcaacctggtgtctgtgctcacccatgcggagggtgccttcgtggcctcactgattaaggagagtagcactgatgacagcaatgtctggattggctccatgacccaaaaaagaaccgccgctggcactggagtagtgggtcctgntctcctacaaaaactgggacactgggatccccgagcagt

SEQ ID NO: 1787 - DNA, 464 bp, Homo sapiens
  misc_feature 15, 336, 339, 349: n = A,T,C or G
gcccttaccgacgtngactatccaagatgtactgaagatcagcgatgcaaactcattagggaggagatggtctgaactgagttggagacatagtctagtttaatttttgacttcatagtaattgcaggaccagttctagacatccatttttcagcttcctctagtttttgaacttgcaaacaaaggagaacttcttctcacaagattcatccttccatttcttgaatcctgagcatgaagtcaggcttgcacagtagccagcattagcactgctcggggatccagtgtcccaggacttgtaggagaccaaggacccactactccagtgccagcggnggntcttttttgngtcatggaggccaatccagacattgctgtcatcagtgctactctccttaatcagtgaggccacgaagcaccctcccctgggtgagcacagacaccaagttgcctgaattcatgtt

SEQ ID NO: 1788 - DNA, 2333 bp, Homo sapiens
acaactgtctgctgcgcccgaaaaacaagtcggtgcgctggggacccggggccggggccgccttactccggcctagccccgcggccctcggtgcgggctccagggcatgctcggtaccccccgcggctccagcccagacgccccggcctcaggtctcggcccccgcttggggccccggccgtgcggcgcgagggagcggccggatggagcggaggatgaaagccggatacttggaccagcaagtgccctacaccttcagcagcaaatcgcccggaaatgggagcttgcgcgaagcgctgatcggcccgctggggaagctcatggacccgggctccctgccgcccctcgactctgaagatctcttccaggatctaagtcacttccaggagacgtggctcgctgaagctcaggtaccagacagtgatgagcagtttgttcctgatttccattcagaaaacctagctttccacagccccaccaccaggatcaagaaggagccccagagtccccgcacagacccggccctgtcctgcagcaggaagccgccactcccctaccaccatggcgagcagtgcctttactccagtgcctatgacccccccagacaaatcgccatcaagtcccctgcccctggtgcccttggacagtcgcccctacagccctttccccgggcagagcaacggaatttcctgagatcctctggcacctcccagccccaccctggccatgggtacctcggggaacatagctccgtcttccagcagcccctggacatttgccactccttcacatctcagggagggggccgggaacccctcccagccccctaccaacaccagctgtcggagccctgcccaccctatccccagcagagctttaagcaagaataccatgatcccctgtatgaacaggcgggccagccagccgtggaccagggtggggtcaatgggcacaggtacccaggggcgggggtggtgatcaaacaggaacagacggacttcgcctacgactcagatgtcaccgggtgcgcatcaatgtacctccacacagagggcttctctgggccctctccaggtgacggggccatgggctatggctatgagaaacctctgcgaccattcccagatgatgtctgcgttgtccctgagaaatttgaaggagacatcaagcaggaaggggtcggtgcatttcgagaggggccgccctaccagcgccggggtgccctgcagctgtggcaatttctggtggccttgctggatgacccaacaaatgcccatttcattgcctggacgggccggggaatggagttcaagctcattgagcctgaggaggtcgccaggctctggggcatccagaagaaccggccagccatgaattacgacaagctgagccgctcgctccgatactattatgagaaaggcatcatgcagaaggtggctggtgagcgttacgtgtacaagtttgtgtgtgagcccgaggccctcttctctttggccttcccggacaatcagcgtccagctctcaaggctgagtttgaccggcctgtcagtgaggaggacacagtccctttgtcccacttggatgagagccccgcctacctcccagagctggctggccccgcccagccatttggccccaagggtggctactcttactagcccccagcggctgttccccctgccgcaggtgggtgctgccctgtgtacatataaatgaatctggtgttggggaaaccttcatctgaaacccacagatgtctctggggcagatccccactgtcctaccagttgccctagcccagactctgagctgctcaccggagtcattgggaaggaaaagtggagaaatggcaagtctagagtctcagaaactcccctgggggtttcacctgggccctggaggaattcagctcagcttcttcctaggtccaagccccccacaccttttccccaaccacagagaacaagagtttgttctgttctgggggacagagaaggcgcttcccaacttcatactggcaggagggtgaggaggttcactgagctccccagatctcccactgcggggagacagaagcctggactctgccccacgctgtggccctggagggtcccggtttgtcagttcttggtgctctgtgttcccagaggcaggcggaggttgaagaaaggaacctgggatgaggggtgctgggtataagcagagagggatgggttcctgctccaagggaccctttgcctttcttctgccctttcctaggcccaggcctgggtttgtacttccacctccaccacatctgccagaccttaataaaggcccccacttctcccatt

SEQ ID NO: 1789 - protein, 551 aa, Homo sapiens
NCLLRPKNKSVRWGPGAGAALLRPSPAALGAGSRACSVPPAAPAQTPRPQVSAPAWGPGRAARGSGRMERRMKAGYLDQQVPYTFSSKSPGNGSLREALIGPLGKLMDPGSLPPLDSEDLFQDLSHFQETWLAEAQVPDSDEQFVPDFHSENLAFHSPTTRIKKEPQSPRTDPALSCSRKPPLPYHHGEQCLYSSAYDPPRQIAIKSPAPGALGQSPLQPFPRAEQRNFLRSSGTSQPHPGHGYLGEHSSVFQQPLDICHSFTSQGGGREPLPAPYQHQLSEPCPPYPQQSFKQEYHDPLYEQAGQPAVDQGGVNGHRYPGAGVVIKQEQTDFAYDSDVTGCASMYLHTEGFSGPSPGDGAMGYGYEKPLRPFPDDVCVVPEKFEGDIKQEGVGAFREGPPYQRRGALQLWQFLVALLDDPTNAHFIAWTGRGMEFKLIEPEEVARLWGIQKNRPAMNYDKLSRSLRYYYEKGIMQKVAGERYVYKFVCEPEALFSLAFPDNQRPALKAEFDRPVSEEDTVPLSHLDESPAYLPELAGPAQPFGPKGGYSY

What is claimed:

1. An isolated polynucleotide comprising a sequence selected from the group consisting of:
(a) sequences provided in SEQ ID NO:1-1788;
(b) complements of the sequences provided in SEQ ID NO:1-1788;
(c) sequences consisting of at least 20 contiguous residues of a sequence provided in SEQ ID NO:1-1788;
(d) sequences that hybridize to a sequence provided in SEQ ID NO:1-1788, under moderately stringent conditions;
(e) sequences having at least 75% identity to a sequence of SEQ ID NO:1-1788;
(f) sequences having at least 90% identity to a sequence of SEQ ID NO:1-1788; and
(g) degenerate variants of a sequence provided in SEQ ID NO:1-1788.

2. An isolated polypeptide comprising an amino acid sequence selected from the group consisting of:
(a) sequences encoded by a polynucleotide of claim 1; and
(b) sequences having at least 70% identity to a sequence encoded by a polynucleotide of claim 1;
(c) sequences having at least 90% identity to a sequence encoded by a polynucleotide of claim 1;
(d) sequences set forth in SEQ ID NO:1789;
(e) sequences having at least 70% identity to a sequence set forth in SEQ ID NO:1789; and
(f) sequences having at least 90% identity to a sequence set forth in SEQ ID NO:1789.

3. An expression vector comprising a polynucleotide of claim 1 operably linked to an expression control sequence.

4. A host cell transformed or transfected with an expression vector according to claim 3.

5. An isolated antibody, or antigen-binding fragment thereof, that specifically binds to a polypeptide of claim 2.

6. A method for detecting the presence of a cancer in a patient, comprising the steps of:
(a) obtaining a biological sample from the patient;
(b) contacting the biological sample with a binding agent that binds to a polypeptide of claim 2;
(c) detecting in the sample an amount of polypeptide that binds to the binding agent; and
(d) comparing the amount of polypeptide to a predetermined cut-off value and therefrom determining the presence of a cancer in the patient.

7. A fusion protein comprising at least one polypeptide according to claim 2.

8. An oligonucleotide that hybridizes to a sequence recited in SEQ ID NO:1-1788 under moderately stringent conditions.

9. A method for stimulating and/or expanding T cells specific for a tumor protein, comprising contacting T cells with at least one component selected from the group consisting of:
(a) polypeptides according to claim 2;
(b) polynucleotides according to claim 1; and
(c) antigen-presenting cells that express a polypeptide according to claim 2,
under conditions and for a time sufficient to permit the stimulation and/or expansion of T cells.

10. An isolated T cell population, comprising T cells prepared according to the method of claim 9.

11. A composition comprising a first component selected from the group consisting of physiologically acceptable carriers and immunostimulants, and a second component selected from the group consisting of:
(a) polypeptides according to claim 2;
(b) polynucleotides according to claim 1;
(c) antibodies according to claim 5;
(d) fusion proteins according to claim 7;
(e) T cell populations according to claim 10; and
(f) antigen presenting cells that express a polypeptide according to claim 2.

12. A method for stimulating an immune response in a patient, comprising administering to the patient a composition of claim 11.

13. A method for the treatment of a cancer in a patient, comprising administering to the patient a composition of claim 11.

14. A method for determining the presence of a cancer in a patient, comprising the steps of:
(a) obtaining a biological sample from the patient;
(b) contacting the biological sample with an oligonucleotide according to claim 8;
(c) detecting in the sample an amount of a polynucleotide that hybridizes to the oligonucleotide; and
(d) compare the amount of polynucleotide that hybridizes to the oligonucleotide to a predetermined cut-off value, and therefrom determining the presence of the cancer in the patient.

15. A diagnostic kit comprising at least one oligonucleotide according to claim 8.

16. A diagnostic kit comprising at least one antibody according to claim 5 and a detection reagent, wherein the detection reagent comprises a reporter group.

17. A method for inhibiting the development of a cancer in a patient, comprising the steps of:
(a) incubating CD4+ and/or CD8+ T cells isolated from a patient with at least one component selected from the group consisting of: (i) polypeptides according to claim 2; (ii) polynucleotides according to claim 1; and (iii) antigen presenting cells that express a polypeptide of claim 2, such that T cell proliferate;
(b) administering to the patient an effective amount of the proliferated T cells,
and thereby inhibiting the development of a cancer in the patient.
